(19) United States
(12) Patent Application Publication
(10) Pub. No.: US 2023/0173105 A1
(43) Pub. Date: Jun. 8, 2023

(54) DIFFERENTIAL KNOCKOUT OF AN ALLELE OF A HETEROZYGOUS RHODOPSIN GENE

(71) Applicant: EmendoBio Inc., Wilmington, DE (US)

(72) Inventors: Lior Izhar, Tel Aviv (IL); David Baram, Nir Zvi (IL); Joe Georgeson, Rehevot (IL); Michal Golan-Mashiach, Ness-Ziona (IL); Asael Herman, Ness-Ziona (IL); Rafi Emmanuel, Ramla (IL)

(73) Assignee: EmendoBio Inc., Wilmington, DE (US)

(21) Appl. No.: 16/202,955

(22) Filed: Nov. 28, 2018

Related U.S. Application Data
(60) Provisional application No. 62/680,475, filed on Jun. 4, 2018.
(60) Provisional application No. 62/591,321, filed on Nov. 28, 2017.

(51) Int. Cl. A61K 48/00; C12N 9/22; A61P 27/00

(52) U.S. Cl. CPC A61K 48/0066; C12N 9/22; A61P 27/00; C12Y 301/13005

(57) ABSTRACT

RNA molecules comprising a guide sequence portion having 17-20 nucleotides in the sequence of 17-20 contiguous nucleotides set forth in any one of SEQ ID NOs: 1-3010 and compositions, methods, and uses thereof

[0001] This application claims the benefit of U.S. Provisional Application No. 62/680,475, filed Jun. 4, 2018 and U.S. Provisional Application No. 62/591,321, filed Nov. 28, 2017, the contents of each of which are hereby incorporated by reference.

[0002] Throughout this application, various publications are referenced, including referenced in parenthesis. The disclosures of all publications mentioned in this application in their entireties are hereby incorporated by reference into this application in order to provide additional description of the art to which this invention pertains and of the features in the art which can be employed with this invention.

### REFERENCE TO SEQUENCE LISTING

[0003] This application incorporates-by-reference nucleotide sequences which are present in the filed named “181128_90236-A_Sequence_Listing_ADR.txt”, which is 551 kilobytes in size, and which was created on Nov. 27, 2018 in the IBM-PC machine format, having an operating system compatibility with MS-Windows, which is contained in the text file filed Nov. 28, 2018 as part of this application.

### BACKGROUND OF INVENTION

[0004] There are several classes of DNA variation in the human genome, including insertions and deletions, differences in the copy number of repeated sequences, and single nucleotide polymorphisms (SNPs). A SNP is a DNA sequence variation occurring when a single nucleotide (adenine (A), thymine (T), cytosine (C), or guanine (G)) in the genome differs between human subjects or paired chromosomes in an individual. Over the years, the different types of DNA variations have been the focus of the research community either as markers in studies to pinpoint traits or disease causation or as potential causes of genetic disorders.

[0005] A genetic disorder is caused by one or more abnormalities in the genome. Genetic disorders may be regarded as either “dominant” or “recessive.” Recessive genetic disorders are those which require two copies (i.e., two alleles) of the abnormal/defective gene to be present. In contrast, a dominant genetic disorder involves a gene or genes which exhibit(s) dominance over a normal (functional/healthy) gene or genes. As such, in dominant genetic disorders only a single copy (i.e., allele) of an abnormal gene is required to cause or contribute to the symptoms of a particular genetic disorder. Such mutations include, for example, gain-of-function mutations in which the altered gene product possesses a new molecular function or a new pattern of gene expression. Other examples include dominant negative mutations, which have a gene product that acts antagonistically to the wild-type allele.

### Retinitis Pigmentosa

[0006] Retinitis pigmentosa (RP) is a clinically and genetically heterogeneous group of inherited degenerative retinal disorders. RP may be inherited in an autosomal dominant, recessive, or x-linked manner and there are multiple genes that, when mutated, may cause the retinitis pigmentosa phenotype. Several mutations in Rhodopsin gene (Rho) have been associated with autosomal dominant retinitis pigmentosa.

### SUMMARY OF THE INVENTION

[0007] Disclosed is an approach for knocking out the expression of a dominant-mutated allele by disrupting the dominant-mutated allele or degrading the resulting mRNA.

[0008] The present disclosure provides a method for utilizing at least one naturally occurring nucleotide difference or polymorphism (e.g., single nucleotide polymorphism (SNP)) for distinguishing/discriminating between two alleles of a gene, one allele bearing a mutation such that it encodes a mutated protein causing a disease phenotype (“mutated allele”), and the other allele encoding for a functional protein (“functional allele”). In some embodiments, the method further comprises the step of knocking out expression of the mutated protein and allowing expression of the functional protein.

[0009] According to embodiments of the present invention, there is provided a first RNA molecule comprising a guide sequence portion having 17-20 nucleotides in the sequence of 17-20 contiguous nucleotides set forth in any one of SEQ ID NOs: 1-3010.

[0010] According to embodiments of the present invention, there is provided a first RNA molecule comprising a guide sequence portion having 17-20 contiguous nucleotides set forth in any one of SEQ ID NOs: 1-3010.

[0011] According to some embodiments of the present invention, there is provided a composition comprising an RNA molecule comprising a guide sequence portion having 17-20 nucleotides in the sequence of 17-20 contiguous nucleotides set forth in any one of SEQ ID NOs: 1-3010 and a CRISPR nuclease.

[0012] According to some embodiments of the present invention, there is provided a method for inactivating a mutant Rho allele in a cell, the method comprising delivering to the cell a composition comprising an RNA molecule comprising a guide sequence portion having 17-20 nucleotides in the sequence of 17-20 contiguous nucleotides set forth in any one of SEQ ID NOs: 1-3010 and a CRISPR nuclease.

[0013] According to some embodiments of the present invention, there is provided a method for treating retinitis pigmentosa, the method comprising delivering to a subject having retinitis pigmentosa a composition comprising an RNA molecule comprising a guide sequence portion having 17-20 nucleotides in the sequence of 17-20 contiguous nucleotides set forth in any one of SEQ ID NOs: 1-3010 and a CRISPR nuclease.

[0014] According to some embodiments of the present invention, there is provided use of a composition comprising an RNA molecule comprising a guide sequence portion having 17-20 nucleotides in the sequence of 17-20 contiguous nucleotides set forth in any one of SEQ ID NOs: 1-3010 and a CRISPR nuclease for inactivating a mutant Rho allele in a cell, comprising delivering to the cell the composition comprising an RNA molecule comprising a guide sequence portion having 17-20 nucleotides in the sequence of 17-20 contiguous nucleotides set forth in any one of SEQ ID NOs: 1-3010 and a CRISPR nuclease.

[0015] According to embodiments of the present invention, there is provided a medicament comprising an RNA molecule comprising a guide sequence portion having 17-20 nucleotides in the sequence of 17-20 contiguous nucleotides set forth in any one of SEQ ID NOs: 1-3010 and a CRISPR nuclease for use in inactivating a mutant Rho allele in a cell, wherein the medicament is administered by delivering to the cell the composition comprising an RNA molecule comprising a guide sequence portion having 17-20 nucleotides in the sequence of 17-20 contiguous nucleotides set forth in any one of SEQ ID NOs: 1-3010 and a CRISPR nuclease.

[0016] According to some embodiments of the present invention, there is provided use of a composition comprising an RNA molecule comprising a guide sequence portion having 17-20 nucleotides in the sequence of 17-20 contiguous nucleotides set forth in any one of SEQ ID NOs: 1-3010 and a CRISPR nuclease for treating ameliorating or preventing retinitis pigmentosa, comprising delivering to a subject having or at risk of having retinitis pigmentosa the composition of comprising an RNA molecule comprising a guide sequence portion having 17-20 nucleotides in the sequence of 17-20 contiguous nucleotides set forth in any one of SEQ ID NOs: 1-3010 and a CRISPR nuclease.

[0017] According to some embodiments of the present invention, there is provided a medicament comprising the composition comprising an RNA molecule comprising a guide sequence portion having 17-20 nucleotides in the sequence of 17-20 contiguous nucleotides set forth in any one of SEQ ID NOs: 1-3010 and a CRISPR nuclease for use in treating ameliorating or preventing retinitis pigmentosa, wherein the medicament is administered by delivering to a subject having or at risk of having retinitis pigmentosa the composition comprising an RNA molecule comprising a guide sequence portion having 17-20 nucleotides in the sequence of 17-20 contiguous nucleotides set forth in any one of SEQ ID NOs: 1-3010 and a CRISPR nuclease.

[0018] According to some embodiments of the present invention, there is provided a kit for inactivating a mutant Rho allele in a cell, comprising an RNA molecule comprising a guide sequence portion having 17-20 nucleotides in the sequence of 17-20 contiguous nucleotides set forth in any one of SEQ ID NOs: 1-3010, a CRISPR nuclease, and/or a tracrRNA molecule; and instructions for delivering the RNA molecule; CRISPR nuclease, and/or the tracrRNA to the cell.

[0019] According to some embodiments of the present invention, there is provided a kit for treating retinitis pigmentosa in a subject, comprising an RNA molecule comprising a guide sequence portion having 17-20 nucleotides in the sequence of 17-20 contiguous nucleotides set forth in any one of SEQ ID NOs: 1-3010, a CRISPR nuclease, and/or a tracrRNA molecule; and instructions for delivering the RNA molecule; CRISPR nuclease, and/or the tracrRNA to a subject having or at risk of having retinitis pigmentosa.

### DETAILED DESCRIPTION

### Definitions

[0020] Unless otherwise defined, all technical and/or scientific terms used herein have the same meaning as commonly understood by one of ordinary skill in the art to which the invention pertains. Although methods and materials similar or equivalent to those described herein can be used in the practice or testing of embodiments of the invention, exemplary methods and/or materials are described below. In case of conflict, the patent specification, including definitions, will control. In addition, the materials, methods, and examples are illustrative only and are not intended to be necessarily limiting.

[0021] It should be understood that the terms “a” and “an” as used above and elsewhere herein refer to “one or more” of the enumerated components. It will be clear to one of ordinary skill in the art that the use of the singular includes the plural unless specifically stated otherwise. Therefore, the terms “a,” “an” and “at least one” are used interchangeably in this application.

[0022] For purposes of better understanding the present teachings and in no way limiting the scope of the teachings, unless otherwise indicated, all numbers expressing quantities, percentages or proportions, and other numerical values used in the specification and claims, are to be understood as being modified in all instances by the term “about.” Accordingly, unless indicated to the contrary, the numerical parameters set forth in the following specification and attached claims are approximations that may vary depending upon the desired properties sought to be obtained. At the very least, each numerical parameter should at least be construed in light of the number of reported significant digits and by applying ordinary rounding techniques.

[0023] Unless otherwise stated, adjectives such as “substantially” and “about” modifying a condition or relationship characteristic of a feature or features of an embodiment of the invention, are understood to mean that the condition or characteristic is defined to within tolerances that are acceptable for operation of the embodiment for an application for which it is intended. Unless otherwise indicated, the word “or” in the specification and claims is considered to be the inclusive “or” rather than the exclusive or, and indicates at least one of, or any combination of items it conjoins.

[0024] In the description and claims of the present application, each of the verbs, “comprise,” “include” and “have” and conjugates thereof, are used to indicate that the object or objects of the verb are not necessarily a complete listing of components, elements or parts of the subject or subjects of the verb. Other terms as used herein are meant to be defined by their well-known meanings in the art.

[0025] The “guide sequence portion” of an RNA molecule refers to a nucleotide sequence that is capable of hybridizing to a specific target DNA sequence, e.g., the guide sequence portion has a nucleotide sequence which is fully complementary to said target DNA sequence. In some embodiments, the guide sequence portion is 17, 18, 19, 20, 21, 22, 23, or 24 nucleotides in length, or approximately 17-24, 18-22, 19-22, 18-20, or 17-20 nucleotides in length. The guide sequence portion may be part of an RNA molecule that can form a complex with a CRISPR nuclease with the guide sequence portion serving as the DNA targeting portion of the CRISPR complex. When the DNA molecule having the guide sequence portion is present contemporaneously with the CRISPR molecule the RNA molecule is capable of targeting the CRISPR nuclease to the specific target DNA sequence. Each possibility represents a separate embodiment. An RNA molecule can be custom designed to target any desired sequence.

[0026] In embodiments of the present invention, an RNA molecule comprises a guide sequence portion having 17-20 nucleotides in the sequence of 17-20 contiguous nucleotides set forth in any one of SEQ ID NOs: 1-3010, 1-838, or 839-3010.

[0027] As used herein, “contiguous nucleotides” set forth in a SEQ ID NO refers to nucleotides in a sequence of nucleotides in the order set forth in the SEQ ID NO without any intervening nucleotides.

[0028] In embodiments of the present invention, the guide sequence portion may be 20 nucleotides in length and consists of 20 nucleotides in the sequence of 20 contiguous nucleotides set forth in any one of SEQ ID NOs: 1-3010. In embodiments of the present invention, the guide sequence portion may be less than 20 nucleotides in length. For example, in embodiments of the present invention the guide sequence portion may be 17, 18, or 19 nucleotides in length. In such embodiments the guide sequence portion may consist of 17, 18, or 19 nucleotides, respectively, in the sequence of 17-20 contiguous nucleotides set forth in any one of SEQ ID NOs: 1-3010. For example, a guide sequence portion having 17 nucleotides in the sequence of 17 contiguous nucleotides set forth in SEQ ID NO: 1 may consist of any one of the following nucleotide sequences (nucleotides excluded from the contiguous sequence are marked in strike-through):

SEQ ID NO: 1
UGGGGUUUUUCCCAUUCCCA
17 nucleotide guide sequence 1: [symbol]
GGUUUUUCCCAUUCCCA
17 nucleotide guide sequence 2: [symbol]
GGGUUUUUCCCAUUCCC [symbol]
17 nucleotide guide sequence 3: [symbol]
GGGGUUUUUCCCAUUCC [symbol]
17 nucleotide guide sequence 4:
UGGGGUUUUUCCCAUUC

[symbol]

[0029] In embodiments of the present invention, the guide sequence portion may be greater than 20 nucleotides in length. For example, in embodiments of the present invention the guide sequence portion may be 21, 22, 23, or 24 nucleotides in length. In such embodiments the guide sequence portion comprises 20 nucleotides in the sequence of 20 contiguous nucleotides set forth in any one of SEQ ID NOs: 1-3010 and additional nucleotides fully complimentary to a nucleotide or sequence of nucleotides adjacent to the 3′ end of the target sequence, 5′ end of the target sequence, or both.

[0030] In embodiments of the present invention a CRISPR nuclease and an RNA molecule comprising a guide sequence portion form a CRISPR complex that binds to a target DNA sequence to effect cleavage of the target DNA sequence. CRISPR nucleases, e.g. Cpf1, may form a CRISPR complex comprising a CRISPR nuclease and RNA molecule without a further tracrRNA molecule. Alternatively, CRISPR nucleases, e.g. Cas9, may form a CRISPR complex between the CRISPR nuclease, an RNA molecule, and a tracrRNA molecule.

[0031] In embodiments of the present invention, the RNA molecule may further comprise the sequence of a tracrRNA molecule. Such embodiments may be designed as a synthetic fusion of the guide portion of the RNA molecule and the trans-activating crRNA (tracrRNA). (See Jinek (2012) Science). Embodiments of the present invention may also form CRISPR complexes utilizing a separate tracrRNA molecule and a separate RNA molecule comprising a guide sequence portion. In such embodiments the tracrRNA molecule may hybridize with the RNA molecule via basepairing and may be advantageous in certain applications of the invention described herein.

[0032] The term “tracr mate sequence” refers to a sequence sufficiently complementary to a tracrRNA molecule so as to hybridize to the tracrRNA via basepairing and promote the formation of a CRISPR complex. (See e.g., U.S. Pat. No. 8,906,616). In embodiments of the present invention, the RNA molecule may further comprise a portion having a tracr mate sequence.

[0033] A “gene,” for the purposes of the present disclosure, includes a DNA region encoding a gene product, as well as all DNA regions which regulate the production of the gene product, whether or not such regulatory sequences are adjacent to coding and/or transcribed sequences. Accordingly, a gene includes, but is not necessarily limited to, promoter sequences, terminators, translational regulatory sequences such as ribosome binding sites and internal ribosome entry sites, enhancers, silencers, insulators, boundary elements, replication origins, matrix attachment sites and locus control regions.

[0034] “Eukaryotic” cells include, but are not limited to, fungal cells (such as yeast), plant cells, animal cells, mammalian cells and human cells.

[0035] The term “nuclease” as used herein refers to an enzyme capable of cleaving the phosphodiester bonds between the nucleotide subunits of nucleic acid. A nuclease may be isolated or derived from a natural source. The natural source may be any living organism. Alternatively, a nuclease may be a modified or a synthetic protein which retains the phosphodiester bond cleaving activity. Gene modification can be achieved using a nuclease, for example a CRISPR nuclease.

### Embodiments

[0036] The present disclosure provides a method for utilizing at least one naturally occurring nucleotide difference or polymorphism (e.g., single nucleotide polymorphism (SNP)) for distinguishing/discriminating between two alleles of a gene, one allele bearing a mutation such that it encodes a mutated protein causing a disease phenotype (“mutated allele”), and the other allele encoding for a functional protein (“functional allele”). The method further comprises the step of knocking out expression of the mutated protein and allowing expression of the functional protein. In some embodiments, the method is for treating, ameliorating, or preventing a dominant negative genetic disorder.

[0037] According to embodiments of the present invention, there is provided a first RNA molecule comprising a guide sequence portion having 17-20 nucleotides in the sequence of 17-20 contiguous nucleotides set forth in any one of SEQ ID NOs: 1-3010.

[0038] According to embodiments of the present invention, there is provided a first RNA molecule comprising a guide sequence portion having 17-20 contiguous nucleotides set forth in any one of SEQ ID NOs: 1-3010.

[0039] According embodiments of the present invention, an RNA molecule may further comprise a portion having a sequence which binds to a CRISPR nuclease.

[0040] According to embodiments of the present invention, the sequence which binds to a CRISPR nuclease is a tracrRNA sequence.

[0041] According to embodiments of the present invention, an RNA molecule may further comprise a portion having a tracr mate sequence.

[0042] According to embodiments of the present invention, an RNA molecule may further comprise one or more linker portions.

[0043] According to embodiments of the present invention, an RNA molecule may be up to 300, 290, 280, 270, 260, 250, 240, 230, 220, 210, 200, 190, 180, 170, 160, 150, 140, 130, 120, 110, or 100 nucleotides in length. Each possibility represents a separate embodiment. In embodiments of the present invention, the RNA molecule may be 17 up to 300 nucleotides in length, 100 up to 300 nucleotides in length, 150 up to 300 nucleotides in length, 200 up to 300 nucleotides in length, 100 to 200 nucleotides in length, or 150 up to 250 nucleotides in length. Each possibility represents a separate embodiment.

[0044] According to some embodiments of the present invention, there is provided a composition comprising an RNA molecule comprising a guide sequence portion having 17-20 nucleotides in the sequence of 17-20 contiguous nucleotides set forth in any one of SEQ ID NOs: 1-3010 and a CRISPR nuclease.

[0045] According to embodiments of the present invention, the composition may comprise a second RNA molecule comprising a guide sequence portion.

[0046] According to embodiments of the present invention, the guide sequence portion of the second RNA molecule comprises 17-20 nucleotides in the sequence of 17-20 contiguous nucleotides set forth in any one of SEQ ID NOs: 1-3010.

[0047] According to embodiments of the present invention, the 17-20 nucleotides of the guide sequence portion of the second RNA molecule are in a different sequence from the sequence of the guide sequence portion of the first RNA molecule

[0048] Embodiments of the present invention may comprise a tracrRNA molecule.

[0049] According to some embodiments of the present invention, there is provided a method for inactivating a mutant Rho allele in a cell, the method comprising delivering to the cell a composition comprising an RNA molecule comprising a guide sequence portion having 17-20 nucleotides in the sequence of 17-20 contiguous nucleotides set forth in any one of SEQ ID NOs: 1-3010 and a CRISPR nuclease.

[0050] According to some embodiments of the present invention, there is provided a method for treating retinitis pigmentosa, the method comprising delivering to a subject having retinitis pigmentosa a composition comprising an RNA molecule comprising a guide sequence portion having 17-20 nucleotides in the sequence of 17-20 contiguous nucleotides set forth in any one of SEQ ID NOs: 1-3010 and a CRISPR nuclease.

[0051] According to embodiments of the present invention, the composition comprises a second RNA molecule comprising a guide sequence portion having 17-20 nucleotides in the sequence of 17-20 contiguous nucleotides set forth in any one of SEQ ID NOs: 1-3010.

[0052] According to embodiments of the present invention, the 17-20 nucleotides of the guide sequence portion of the second RNA molecule are in a different sequence from the sequence of the guide sequence portion of the first RNA molecule

[0053] According to embodiments of the present invention, the CRISPR nuclease and the RNA molecule or RNA molecules are delivered to the subject and/or cells substantially at the same time or at different times.

[0054] According to embodiments of the present invention, the tracrRNA is delivered to the subject and/or cells substantially at the same time or at different times as the CRISPR nuclease and RNA molecule or RNA molecules.

[0055] According to embodiments of the present invention, the first RNA molecule targets a SNP or disease-causing mutation in an exon or promoter of a mutated allele, and wherein the second RNA molecule targets a SNP in the same or a different exon of the mutated allele, a SNP in an intron, or a sequence in an intron present in both the mutated or functional allele.

[0056] According to embodiments of the present invention, the first RNA molecule or the first and the second RNA molecules target a SNP in the promoter region, the start codon, or the untranslated region (UTR) of a mutated allele.

[0057] According to embodiments of the present invention, the first RNA molecule or the first and the second RNA molecules targets at least a portion of the promoter and/or the start codon and/or a portion of the UTR of a mutated allele.

[0058] According to embodiments of the present invention, the first RNA molecule targets a portion of the promoter, a first SNP in the promoter, or a SNP upstream to the promoter of a mutated allele and the second RNA molecule is targets a second SNP, which is downstream of the first SNP, and is in the promoter, in the UTR, or in an intron or in an exon of a mutated allele.

[0059] According to embodiments of the present invention, the first RNA molecule targets a SNP in the promoter, upstream of the promoter, or the UTR of a mutated allele and the second RNA molecule is designed to target a sequence which is present in an intron of both the mutated allele and the functional allele.

[0060] According to embodiments of the present invention, the first RNA molecule targets a sequence upstream of the promotor which is present in both a mutated and functional allele and the second RNA molecule targets a SNP or disease-causing mutation in any location of the gene.

[0061] According to embodiments of the present invention, there is provided a method comprising removing an exon containing a disease-causing mutation from a mutated allele, wherein the first RNA molecule or the first and the second RNA molecules target regions flanking an entire exon or a portion of the exon.

[0062] According to embodiments of the present invention, there is provided a method comprising removing multiple exons, the entire open reading frame of a gene, or removing the entire gene.

[0063] According to embodiments of the present invention, the first RNA molecule targets a SNP or disease-causing mutation in an exon or promoter of a mutated allele, and wherein the second RNA molecule targets a SNP in the same or a different exon of the mutated allele, a SNP in an intron, or a sequence in an intron present in both the mutated or functional allele.

[0064] According to embodiments of the present invention, the first RNA molecule or the first and the second RNA molecules target an alternative splicing signal sequence between an exon and an intron of a mutant allele.

[0065] According to embodiments of the present invention, the second RNA molecule targets a sequence present in both a mutated allele and a functional allele.

[0066] According to embodiments of the present invention, the second RNA molecule targets an intron.

[0067] According to embodiments of the present invention, there is provided a method comprising subjecting the mutant allele to insertion or deletion by an error prone non-homologous end joining (NHEJ) mechanism, generating a frameshift in the mutated allele's sequence.

[0068] According to embodiments of the present invention, the frameshift results in inactivation or knockout of the mutated allele.

[0069] According to embodiments of the present invention, the frameshift creates an early stop codon in the mutated allele.

[0070] According to embodiments of the present invention, the frameshift results in nonsense-mediated mRNA decay of the transcript of the mutant allele.

[0071] According to embodiments of the present invention, the inactivating or treating results in a truncated protein encoded by the mutated allele and a functional protein encoded by the functional allele.

[0072] According to some embodiments of the present invention, there is provided use of a composition comprising an RNA molecule comprising a guide sequence portion having 17-20 nucleotides in the sequence of 17-20 contiguous nucleotides set forth in any one of SEQ ID NOs: 1-3010 and a CRISPR nuclease inactivating a mutant Rho allele in a cell, comprising delivering to the cell the RNA molecule comprising a guide sequence portion having 17-20 nucleotides in the sequence of 17-20 contiguous nucleotides set forth in any one of SEQ ID NOs: 1-3010 and the CRISPR nuclease.

[0073] According to embodiments of the present invention, there is provided a medicament comprising an RNA molecule comprising a guide sequence portion having 17-20 nucleotides in the sequence of 17-20 contiguous nucleotides set forth in any one of SEQ ID NOs: 1-3010 and a CRISPR nuclease for use in inactivating a mutant Rho allele in a cell, wherein the medicament is administered by delivering to the cell the composition comprising an RNA molecule comprising a guide sequence portion having 17-20 nucleotides in the sequence of 17-20 contiguous nucleotides set forth in any one of SEQ ID NOs: 1-3010 and a CRISPR nuclease.

[0074] According to some embodiments of the present invention, there is provided use of a composition comprising an RNA molecule comprising a guide sequence portion having 17-20 nucleotides in the sequence of 17-20 contiguous nucleotides set forth in any one of SEQ ID NOs: 1-3010 and a CRISPR nuclease for treating ameliorating or preventing retinitis pigmentosa, comprising delivering to a subject having or at risk of having retinitis pigmentosa the composition of comprising an RNA molecule comprising a guide sequence portion having 17-20 nucleotides in the sequence of 17-20 contiguous nucleotides set forth in any one of SEQ ID NOs: 1-3010 and a CRISPR nuclease.

[0075] According to some embodiments of the present invention, there is provided a medicament comprising the composition comprising an RNA molecule comprising a guide sequence portion having 17-20 nucleotides in the sequence of 17-20 contiguous nucleotides set forth in any one of SEQ ID NOs: 1-3010 and a CRISPR nuclease for use in treating ameliorating or preventing retinitis pigmentosa, wherein the medicament is administered by delivering to a subject having or at risk of having retinitis pigmentosa: the composition comprising an RNA molecule comprising a guide sequence portion having 17-20 nucleotides in the sequence of 17-20 contiguous nucleotides set forth in any one of SEQ ID NOs: 1-3010 and a CRISPR nuclease.

[0076] According to some embodiments of the present invention, there is provided a kit for inactivating a mutant Rho allele in a cell, comprising an RNA molecule comprising a guide sequence portion having 17-20 nucleotides in the sequence of 17-20 contiguous nucleotides set forth in any one of SEQ ID NOs: 1-3010, a CRISPR nuclease, and/or a tracrRNA molecule; and instructions for delivering the RNA molecule; CRISPR nuclease, and/or the tracrRNA to the cell.

[0077] According to some embodiments of the present invention, there is provided a kit for treating retinitis pigmentosa in a subject, comprising an RNA molecule comprising a guide sequence portion having 17-20 nucleotides in the sequence of 17-20 contiguous nucleotides set forth in any one of SEQ ID NOs: 1-3010, a CRISPR nuclease, and/or a tracrRNA molecule; and instructions for delivering the RNA molecule; CRISPR nuclease, and/or the tracrRNA to a subject having or at risk of having retinitis pigmentosa.

[0078] In embodiments of the present invention, the RNA molecule comprises a guide sequence portion having 17-20 nucleotides in the sequence of 17-20 contiguous nucleotides set forth in any one of SEQ ID NOs: 1-838, SEQ ID NOs: 839-3010, or SEQ ID NOs 1-3010.

[0079] The compositions and methods of the present disclosure may be utilized for treating, preventing, ameliorating, or slowing progression of retinitis pigmentosa.

[0080] In some embodiments, a mutated allele is deactivated by delivering to a cell an RNA molecule which targets a SNP in the promoter region, the start codon, or the untranslated region (UTR) of the mutated allele.

[0081] In some embodiments, a mutated allele is inactivated by removing at least a portion of the promoter and/or removing the start codon and/or a portion of the UTR. In some embodiments, the method of deactivating a mutated allele comprises removing at least a portion of the promoter. In such embodiments one RNA molecule may be designed for targeting a first SNP in the promoter or upstream to the promoter and another RNA molecule is designed to target a second SNP, which is downstream of the first SNP, and is in the promoter, in the UTR, or in an intron or in an exon. Alternatively, one RNA molecule may be designed for targeting a SNP in the promoter, or upstream of the promoter, or the UTR and another RNA molecule is designed to target a sequence which is present in an intron of both the mutated allele and the functional allele. Alternatively, one RNA molecule may be designed for targeting a sequence upstream of the promotor which is present in both the mutated and functional allele and the other guide is designed to target a SNP or disease-causing mutation in any location of the gene e.g., in an exon, intron, UTR, or downstream of the promoter.

[0082] In some embodiments, the method of deactivating a mutated allele comprises an exon skipping step comprising removing an exon containing a disease-causing mutation from the mutated allele. Removing an exon containing a disease-causing mutation in the mutated allele requires two RNA molecules which target regions flanking the entire exon or a portion of the exon. Removal of an exon containing the disease-causing mutation may be designed to eliminate the disease-causing action of the protein while allowing for expression of the remaining protein product which retains some or all of the wild-type activity. As an alternative to single exon skipping, multiple exons, the entire open reading frame or the entire gene can be excised using two RNA molecules flanking the region desired to be excised.

[0083] In some embodiments, the method of deactivating a mutated allele comprises delivering two RNA molecules to a cell, wherein one RNA molecule targets a SNP or disease-causing mutation in an exon or promoter of the mutated allele, and wherein the other RNA molecule targets a SNP in the same or a different exon of the mutated allele, a SNP in an intron, or a sequence in an intron present in both the mutated or functional allele.

[0084] In some embodiments, an RNA molecule is used to target a CRISPR nuclease to an alternative splicing signal sequence between an exon and an intron of a mutant allele, thereby destroying the alternative splicing signal sequence in the mutant allele.

[0085] Any one of, or combination of, the above-mentioned strategies for deactivating a mutant allele may be used in the context of the invention.

[0086] Additional strategies may be used to deactivate a mutated allele. For example, in embodiments of the present invention, an RNA molecule is used to direct a CRISPR nuclease to an exon or a splice site of a mutated allele in order to create a double-stranded break (DSB), leading to insertion or deletion of nucleotides by an error-prone non-homologous end-joining (NHEJ) mechanism and formation of a frameshift mutation in the mutated allele. The frameshift mutation may result in: (1) inactivation or knockout of the mutated allele by generation of an early stop codon in the mutated allele, resulting in generation of a truncated protein; or (2) nonsense mediated mRNA decay of the transcript of the mutant allele. In further embodiments, one RNA molecule is used to direct a CRISPR nuclease to a promotor of a mutated allele.

[0087] In some embodiments, the method of deactivating a mutated allele further comprises enhancing activity of the functional protein such as by providing a protein/peptide, a nucleic acid encoding a protein/peptide, or a small molecule such as a chemical compound, capable of activating/enhancing activity of the functional protein.

[0088] According to some embodiments, the present disclosure provides an RNA sequence (RNA molecule') which binds to / associates with and/or directs the RNA guided DNA nuclease e.g., CRISPR nuclease to a sequence comprising at least one nucleotide which differs between a mutated allele and a functional allele (e.g., SNP) of a gene of interest (i.e., a sequence of the mutated allele which is not present in the functional allele).

[0089] In some embodiments, the method comprises the steps of: contacting a mutated allele of a gene of interest with an allele-specific RNA molecule and a CRISPR nuclease e.g., a Cas9 protein, wherein the allele-specific RNA molecule and the CRISPR nuclease e.g., Cas9 associate with a nucleotide sequence of the mutated allele of the gene of interest which differs by at least one nucleotide from a nucleotide sequence of a functional allele of the gene of interest, thereby modifying or knocking-out the mutated allele.

[0090] In some embodiments, the allele-specific RNA molecule and a CRISPR nuclease is introduced to a cell encoding the gene of interest. In some embodiments, the cell encoding the gene of interest is in a mammalian subject. In some embodiments, the cell encoding the gene of interest is in a plant.

[0091] In some embodiments, the cleaved mutated allele is further subjected to insertion or deletion (indel) by an error prone non-homologous end joining (NHEJ) mechanism, generating a frameshift in the mutated allele's sequence. In some embodiments, the generated frameshift results in inactivation or knockout of the mutated allele. In some embodiments, the generated frameshift creates an early stop codon in the mutated allele and results in generation of a truncated protein. In such embodiments, the method results in the generation of a truncated protein encoded by the mutated allele and a functional protein encoded by the functional allele. In some embodiments, a frameshift generated in a mutated allele using the methods of the invention results in nonsense-mediated mRNA decay of the transcript of the mutant allele.

[0092] In some embodiments, the mutated allele is an allele of the Rho gene. In some embodiments, the RNA molecule targets a SNP which co-exists with / is genetically linked to the mutated sequence associated with retinitis pigmentosa genetic disorder. In some embodiments, the RNA molecule targets a SNP which is highly prevalent in the population and exists in the mutated allele having the mutated sequence associated with retinitis pigmentosa genetic disorder and not in the functional allele of an individual subject to be treated. In some embodiments, a disease-causing mutation within a mutated Rho allele is targeted.

[0093] In some embodiments, the SNP is within an exon of the gene of interest. In such embodiments, a guide sequence portion of an RNA molecule may be designed to associate with a sequence of the exon of the gene of interest.

[0094] In some embodiments, SNP is within an intron or an exon of the gene of interest. In some embodiments, SNP is in close proximity to a splice site between the intron and the exon. In some embodiments, the close proximity to a splice site is 1, 2, 3, 4, 5, 6, 7, 8, 9, 10, 11, 12, 13, 14, 15, 16, 17, 18, 19, or 20 nucleotides upstream or downstream to the splice site. Each possibility represents a separate embodiment of the present invention. In such embodiments, a guide sequence portion of an RNA molecule may be designed to associate with a sequence of the gene of interest which comprises the splice site.

[0095] In some embodiments, the method is utilized for treating a subject having a disease phenotype resulting from the heterozygote Rho gene. In such embodiments, the method results in improvement, amelioration or prevention of the disease phenotype.

[0096] Embodiments referred to above refer to a CRISPR nuclease, RNA molecule(s), and tracrRNA being effective in a subject or cells at the same time. The CRISPR, RNA molecule(s), and tracrRNA can be delivered substantially at the same time or can be delivered at different times but have effect at the same time. For example, this includes delivering the CRISPR nuclease to the subject or cells before the RNA molecule and/or tracr RNA is substantially extant in the subject or cells.

[0097] In some embodiments, the cell is a retinal cell. In some embodiments, the cell is a photoreceptor cell. In some embodiments, the photoreceptor cell is a rod photoreceptor cell. In some embodiments, the photoreceptor cell is a cone photoreceptor cell.

### Dominant Genetic Disorders.

[0098] One of skill in the art will appreciate that all subjects with any type of heterozygote genetic disorder (e.g., dominant genetic disorder) may be subjected to the methods described herein. In one embodiment, the present invention may be used to target a gene involved in, associated with, or causative of dominant genetic disorders such as, for example retinitis pigmentosa. In some embodiments, the dominant genetic disorder is retinitis pigmentosa. In some embodiments, the target gene is the Rho gene (Entrez Gene, gene ID No: 6010).

CRISPR nucleases and PAM recognition

[0099] In some embodiments, the sequence specific nuclease is selected from CRISPR nucleases, or a functional variant thereof. In some embodiments, the sequence specific nuclease is an RNA guided DNA nuclease. In such embodiments, the RNA sequence which guides the RNA guided DNA nuclease (e.g., Cpf1) binds to and/or directs the RNA guided DNA nuclease to the sequence comprising at least one nucleotide which differs between a mutated allele and its counterpart functional allele (e.g., SNP). In some embodiments, the CRISPR complex does not further comprise a tracrRNA. In a non-limiting example, in which the RNA guided DNA nuclease is a CRISPR protein, the at least one nucleotide which differs between the dominant mutated allele and the functional allele may be within the PAM site and/or proximal to the PAM site within the region that the RNA molecule is designed to hybridize to. A skilled artisan will appreciate that RNA molecules can be engineered to bind to a target of choice in a genome by commonly known methods in the art.

[0100] In embodiments of the present invention, a type II CRISPR system utilizes a mature crRNA:tracrRNA complex directs a CRISPR nuclease, e.g. Cas9, to the target DNA via Watson-Crick base-pairing between the crRNA and the protospacer on the target DNA next to the protospacer adjacent motif (PAM), an additional requirement for target recognition. The CRISPR nuclease then mediates cleavage of target DNA to create a double-stranded break within the protospacer. A skilled artisan will appreciate that each of the engineered RNA molecule of the present invention is further designed such as to associate with a target genomic DNA sequence of interest next to a protospacer adjacent motif (PAM), e.g., a PAM matching the sequence relevant for the type of CRISPR nuclease utilized, such as for a non-limiting example, NGG or NAG, wherein “N” is any nucleobase, for Streptococcus pyogenes Cas9 WT (SpCAS9); NNGRRT for Staphylococcus aureus (SaCas9); NNNVRYM for Jejuni Cas9 WT; NGAN or NGNG for SpCas9-VQR variant; NGCG for SpCas9-VRER variant; NGAG for SpCas9-EQR variant; NNNNGATT for Neisseria meningitidis (NmCas9); or TTTV for Cpf1. RNA molecules of the present invention are each designed to form complexes in conjunction with one or more different CRISPR nucleases and designed to target polynucleotide sequences of interest utilizing one or more different PAM sequences respective to the CRISPR nuclease utilized.

[0101] In some embodiments, an RNA-guided DNA nuclease e.g., a CRISPR nuclease, may be used to cause a DNA break at a desired location in the genome of a cell. The most commonly used RNA-guided DNA nucleases are derived from CRISPR systems, however, other RNA-guided DNA nucleases are also contemplated for use in the genome editing compositions and methods described herein. For instance, see U.S. Patent Publication No. 2015-0211023, incorporated herein by reference.

[0102] CRISPR systems that may be used in the practice of the invention vary greatly. CRISPR systems can be a type I, a type II, or a type III system. Non- limiting examples of suitable CRISPR proteins include Cas3, Cas4, Cas5, Cas5e (or CasD), Cas6, Cas6e, Cas6f, Cas7, Cas8a1, Cas8a2, Cas8b, Cas8c, Cas9, Casl0, Casl Od, CasF, CasG, CasH, Csyl1, Csy2, Csy3, Csel (or CasA), Cse2 (or CasB), Cse3 (or CasE), Cse4 (or CasC), Csc1, Csc2, Csa5, Csn2, Csm2, Csm3, Csm4, Csm5, Csm6, Cmr1, Cmr3, Cmr4, Cmr5, Cmr6, Csbl , Csb2, Csb3,Csx17, Csx14, Csx10, Csx16, CsaX, Csx3, Csz1, Csx15, Csf1, Csf2, Csf3, Csf4, and Cul966.

[0103] In some embodiments, the RNA-guided DNA nuclease is a CRISPR nuclease derived from a type II CRISPR system (e.g., Cas9). The CRISPR nuclease may be derived from Streptococcus pyogenes, Streptococcus thermophilus, Streptococcus sp., Staphylococcus aureus, Neisseria meningitidis, Treponema denticola, Nocardiopsis dassonvillei, Streptomyces pristinaespiralis, Streptomyces viridochromogenes, Streptomyces viridochromogenes, Streptosporangium roseum, Streptosporangium roseum, Alicyclobacillus acidocaldarius, Bacillus pseudomycoides, Bacillus selenitireducens, Exiguobacterium sibiricum, Lactobacillus delbrueckii, Lactobacillus salivarius, Microscilla marina, Burkholderiales bacterium, Polaromonas naphthalenivorans, Polaromonas sp., Crocosphaera watsonii, Cyanothece sp., Microcystis aeruginosa, Synechococcus sp., Acetohalobium arabaticum, Ammonifex degensii, Caldicelulosiruptor becscii, Candidatus Desulforudis, Clostridium botulinum, Clostridium difjicile, Finegoldia magna, Natranaerobius thermophilus, Pelotomaculumthermopropionicum, Acidithiobacillus caldus, Acidithiobacillus ferrooxidans, Allochromatium vinosum, Marinobacter sp., Nitrosococcus halophilus, Nitrosococcus watsoni, Pseudoalteromonas haloplanktis, Ktedonobacter racemifer, Methanohalobium evestigatum, Anabaena variabilis, Nodularia spumigena, Nostoc sp., Arthrospira maxima, Arthrospira platensis, Arthrospira sp., Lyngbya sp., Microcoleus chthonoplastes, Oscillatoria sp., Petrotoga mobilis, Thermosipho africanus, Acaryochloris marina, or any species which encodes a CRISPR nuclease with a known PAM sequence. CRISPR nucleases encoded by uncultured bacteria may also be used in the context of the invention. (See Burstein et al. Nature, 2017). Variants of CRIPSR proteins having known PAM sequences e.g., spCas9 D1135E variant, spCas9 VQR variant, spCas9 EQR variant, or spCas9 VRER variant may also be used in the context of the invention.

[0104] Thus, an RNA guided DNA nuclease of a CRISPR system, such as a Cas9 protein or modified Cas9 or homolog or ortholog of Cas9, or other RNA guided DNA nucleases belonging to other types of CRISPR systems, such as Cpf1 and its homologs and orthologs, may be used in the compositions of the present invention.

[0105] In certain embodiments, the CRIPSR nuclease may be a “functional derivative” of a naturally occurring Cas protein. A “functional derivative” of a native sequence polypeptide is a compound having a qualitative biological property in common with a native sequence polypeptide. “Functional derivatives” include, but are not limited to, fragments of a native sequence and derivatives of a native sequence polypeptide and its fragments, provided that they have a biological activity in common with a corresponding native sequence polypeptide. A biological activity contemplated herein is the ability of the functional derivative to hydrolyze a DNA substrate into fragments. The term “derivative” encompasses both amino acid sequence variants of polypeptide, covalent modifications, and fusions thereof. Suitable derivatives of a Cas polypeptide or a fragment thereof include but are not limited to mutants, fusions, covalent modifications of Cas protein or a fragment thereof. Cas protein, which includes Cas protein or a fragment thereof, as well as derivatives of Cas protein or a fragment thereof, may be obtainable from a cell or synthesized chemically or by a combination of these two procedures. The cell may be a cell that naturally produces Cas protein, or a cell that naturally produces Cas protein and is genetically engineered to produce the endogenous Cas protein at a higher expression level or to produce a Cas protein from an exogenously introduced nucleic acid, which nucleic acid encodes a Cas that is same or different from the endogenous Cas. In some cases, the cell does not naturally produce Cas protein and is genetically engineered to produce a Cas protein.

[0106] In some embodiments, the CRISPR nuclease is Cpf1. Cpf1 is a single RNA-guided endonuclease which utilizes a T-rich protospacer-adjacent motif. Cpf1 cleaves DNA via a staggered DNA double-stranded break. Two Cpf1 enzymes from Acidaminococcus and Lachnospiraceae have been shown to carry out efficient genome-editing activity in human cells. (See Zetsche et al. (2015) Cell.).

[0107] Thus, an RNA guided DNA nuclease of a Type II CRISPR System, such as a Cas9 protein or modified Cas9 or homologs, orthologues, or variants of Cas9, or other RNA guided DNA nucleases belonging to other types of CRISPR systems, such as Cpf1 and its homologs, orthologues, or variants, may be used in the present invention.

[0108] In some embodiments, the guide molecule comprises one or more chemical modifications which imparts a new or improved property (e.g., improved stability from degradation, improved hybridization energetics, or improved binding properties with an RNA guided DNA nuclease). Suitable chemical modifications include, but are not limited to: modified bases, modified sugar moieties, or modified inter-nucleoside linkages. Non-limiting examples of suitable chemical modifications include: 4-acetylcytidine, 5-(carboxyhydroxymethl)uridine, 2′-O-methylcytidine, 5-carboxyrn ethylaminomethyl-2-thiouridine, 5-carboxymethylaminomethyluridine, dihydrouridine, 2′-O-methylpseudouridine, “beta, D-galactosylqueuosine”, 2′-O-methylguanosine, inosine, N6-isopentenyladenosine, 1-methyladenosine, 1-methylpseudouridine, 1-methylguanosine, 1-methylinosine, “2,2-dimethylguanosine”, 2-methyladenosine, 2-methylguanosine, 3-methylcytidine, 5-methyleytidine, No-methyladenosine, 7-methylguanosine, 5-methylaminomethyluridine, methoxyaminomethyl-2-thiouridine, “beta, D-mannosyiqueuosine”, methoxycarbonylmethyl -2-thiouridine, 5-methoxy-carbonylmethyluridine, 5-methoxyuridine, 2-methyithio-N6-isopentenyiadenosine, N-((9-beta-D-ribofuranosyl-2-methylthiopurine-6-yl)carbamoyl)threonine, N-((9-(beta-D-ribofuranosylpurine-6-yl)N-methylcarbamoyl)threonine, uridine-5-oxyacetic acid-methylester, uridine-5-oxyacetic acid, wybutoxosine, queuosine, 2-thiocytidine, 5-methyl-2-thioutidine, 2-thiouridine, 4-thiouridine, 5-methyluridine, N-((9-beta-D-ribofuranosylpurine-6-yl)-carbarnoyl)threonine, 2′-O-methyl-5-methyluridine, 2′-O-tnethyluridine, wybutosine, “3-(3-amino-3-carboxy-propyl)uridine, (acp3)u”, 2′-0-methyl (M), 3′-phosphorothioate (MS), 3′-thioPACE (MSP), pseudouridine, or 1-methyl pseudo-uridine. Each possibility represents a separate embodiment of the present invention.

Guide sequences which specifically target a mutant allele

[0109] A given gene may contain thousands of SNPs. Utilizing a 24 base pair target window for targeting each SNP in a gene would require hundreds of thousands of guide sequences. Any given guide sequence when utilized to target a SNP may result in degradation of the guide sequence, limited activity, no activity, or off-target effects. Accordingly, suitable guide sequences are necessary for targeting a given gene. By the present invention, a novel set of guide sequences have been identified for knocking out expression of a mutated Rho protein, inactivating a mutant Rho gene allele, and treating retinitis pigmentosa.

[0110] The present disclosure provides guide sequences capable of specifically targeting a mutated allele for inactivation while leaving the functional allele unmodified. The guide sequences of the present invention are designed to, and are most likely to, specifically differentiate between a mutated allele and a functional allele. Of all possible guide sequences which target a mutated allele desired to be inactivated, the specific guide sequences disclosed herein are specifically effective to function with the disclosed embodiments.

[0111] Briefly, the guide sequences may have properties as follows: (1) target SNP/insertion/deletion/indel with a high prevalence in the general population, in a specific ethnic population or in a patient population is above 1% and the SNP/insertion/deletion/indel heterozygosity rate in the same population is above 1%; (2) target a location of a SNP/insertion/deletion/indel proximal to a portion of the gene e.g., within 5k bases of any portion of the gene, for example, a promoter, a UTR, an exon or an intron; and (3) target a mutant allele using an RNA molecule which targets a founder or common pathogenic mutations for the disease/gene. In some embodiments, the prevalence of the SNP/insertion/deletion/indel in the general population, in a specific ethnic population or in a patient population is above 1%, 2%, 3%, 4%, 5%, 6%, 7%, 8%, 9%, 10%, 11%, 12%, 13%, 14%, or 15% and the SNP/insertion/deletion/indel heterozygosity rate in the same population is above 1%, 2%, 3%, 4%, 5%, 6%, 7%, 8%, 9%, 10%, 11%, 12%, 13%, 14%, or 15%. Each possibility represents a separate embodiment and may be combined at will.

[0112] For each gene, according to SNP/insertion/deletion/indel any one of the following strategies may be used to deactivate the mutated allele: (1) Knockout strategy using one RNA molecule—one RNA molecule is utilized to direct a CRISPR nuclease to a mutated allele and create a double-strand break (DSB) leading to formation of a frameshift mutation in an exon or in a splice site region of the mutated allele; (2) Knockout strategy using two RNA molecules—two RNA molecules are utilized. A first RNA molecule targets a region in the promoter or an upstream region of a mutated allele and another RNA molecule targets downstream of the first RNA molecule in a promoter, exon, or intron of the mutated allele; (3) Exon(s) skipping strategy—one RNA molecule may be used to target a CRISPR nuclease to a splice site region, either at the 5′ end of an intron (donor sequence) or the 3′ end of an intron (acceptor sequence), in order to destroy the splice site. Alternatively, two RNA molecules may be utilized such that a first RNA molecule targets an upstream region of an exon and a second RNA molecule targets a region downstream of the first RNA molecule, thereby excising the exon(s). Based on the locations of identified SNPs/insertions/deletions/indels for each mutant allele, any one of, or a combination of, the above-mentioned methods to deactivate the mutant allele may be utilized.

[0113] When only one RNA molecule is used is that the location of the SNP is in an exon or in close proximity (e.g., within 20 basepairs) to a splice site between the intron and the exon. When two RNA molecules are used, guide sequences may target two SNPs such that the first SNP is upstream of exon 1 e.g., within the 5′ untranslated region, or within the promoter or within the first 2 kilobases 5′ of the transcription start site, and the second SNP is downstream of the first SNP e.g., within the first 2 kilobases 5′ of the transcription start site, or within intron 1, 2 or 3, or within exon 1, exon 2, or exon 3.

[0114] Guide sequences of the present invention may target a SNP in the upstream portion of the targeted gene, preferably upstream of the last exon of the targeted gene. Guide sequences may target a SNP upstream to exon 1, for example within the 5′ untranslated region, or within the promoter or within the first 4-5 kilobases 5′ of the transcription start site.

[0115] Guide sequences of the present invention may also target a SNP within close proximity (e.g., within 50 basepairs, more preferably with 20 basepairs) to a known protospacer adjacent motif (PAM) site.

[0116] Guide sequences of the present invention also may target: (1) a heterozygous SNP for the targeted gene; (2) a heterozygous SNPs upstream and downstream of the gene; (3) a SNPs with a prevalence of the SNP/insertion/deletion/indel in the general population, in a specific ethnic population, or in a patient population above 1%; (4) have a guanine-cytosine content of greater than 30% and less than 85%; (5) have no repeat of 4 or more thymine/uracil or 8 or more guanine, cytosine, or adenine; (6) having no off-target identified by off-target analysis; and (7) preferably target Exons over Introns or be upstream of a SNP rather than downstream of a SNP.

[0117] In embodiments of the present invention, the SNP may be upstream or downstream of the gene. In embodiments of the present invention, the SNP is within 4,000 base pairs upstream or downstream of the gene.

[0118] The at least one nucleotide which differs between the mutated allele and the functional allele, may be upstream, downstream or within the sequence of the disease-causing mutation of the gene of interest. The at least one nucleotide which differs between the mutated allele and the functional allele, may be within an exon or within an intron of the gene of interest. In some embodiments, the at least one nucleotide which differs between the mutated allele and the functional allele is within an exon of the gene of interest. In some embodiments, the at least one nucleotide which differs between the mutated allele and the functional allele is within an intron or an exon of the gene of interest, in close proximity to a splice site between the intron and the exon e.g., 1, 2, 3, 4, 5, 6, 7, 8, 9, 10, 11, 12, 13, 14, 15, 16, 17, 18, 19, or 20 nucleotides upstream or downstream to the splice site.

[0119] In some embodiments, the at least one nucleotide is a single nucleotide polymorphisms (SNPs). In some embodiments, each of the nucleotide variants of the SNP may be expressed in the mutated allele. In some embodiments, the SNP may be a founder or common pathogenic mutation.

[0120] Guide sequences may target a SNP which has both (1) a high prevalence in the general population e.g., above 1% in the population; and (2) a high heterozygosity rate in the population, e.g., above 1%. Guide sequences may target a SNP that is globally distributed. A SNP may be a founder or common pathogenic mutation. In some embodiments, the prevalence in the general population is above 1%, 2%, 3%, 4%, 5%, 6%, 7%, 8%, 9%, 10%, 11%, 12%, 13%, 14%, or 15%. Each possibility represents a separate embodiment. In some embodiments, the heterozygosity rate in the population is above 1%, 2%, 3%, 4%, 5%, 6%, 7%, 8%, 9%, 10%, 11%, 12%, 13%, 14%, or 15%. Each possibility represents a separate embodiment.

[0121] In some embodiments, the at least one nucleotide which differs between the mutated allele and the functional allele is linked to/co-exists with the disease-causing mutation in high prevalence in a population. In such embodiments, “high prevalence” refers to at least 92%, 93%, 94%, 95%, 96%, 97%, 98%, 99%, or 100%. Each possibility represents a separate embodiment of the present invention. In one embodiment, the at least one nucleotide which differs between the mutated allele and the functional allele, is a disease-associated mutation. In some embodiments, the SNP is highly prevalent in the population. In such embodiments, “highly prevalent” refers to at least 10%, 11%, 12%, 13%, 14%, 15%, 20%, 30%, 40%, 50%, 60%, or 70% of a population. Each possibility represents a separate embodiment of the present invention.

[0122] Guide sequences of the present invention may satisfy any one of the above criteria and are most likely to differentiate between a mutated allele from its corresponding functional allele.

[0123] In some embodiments the RNA molecule targets a SNP/WT sequence linked to SNPs as shown in Table 1 below. The SNP details are indicated in the 1^{st} column and include: SNP ID No. (based on NCBI's 2018 database of Single Nucleotide Polymorphisms (dbSNP)). For variants with no available rs number variants characteristic are indicated based on gnomAD 2018 browser database. The 2^{nd} column indicates an assigned identifier for each SNP. The 3^{rd} column indicates the location of each SNP on the Rho gene.

TABLE 1
Rho gene SNPs

| RSID | SNP No. | SNP location in the gene |
|---|---|---|
| rs750171247 | s1 | Exon_5 of 5 |
| rs2855558 | s2 | Exon_5 of 5 |
| rs60645924 | s3 | Exon_5 of 5 |
| rs9823319 | s4 | upstream −3163 bp |
| rs2855557 | s5 | Intron_4 of 4 |
| rs2713630 | s6 | upstream −3943 bp |
| rs7984 | s7 | Exon_1 of 5 |
| rs2625954 | s8 | upstream −1067 bp |
| rs2625953 | s9 | upstream −1653 bp |
| rs2625955 | s10 | upstream −682 bp |
| rs58508862 | s11 | upstream −1801 bp |
| rs2410 | s12 | Exon_5 of 5 |
| rs6803468 | s13 | Intron_2 of 4 |
| rs73204247 | s14 | Intron_2 of 4 |
| rs6803484 | s15 | Intron_2 of 4 |
| rs56295021 | s16 | upstream −2129 bp |
| rs3774785 | s17 | upstream −2012 bp |
| rs2713628 | s18 | upstream −2002 bp |
| rs56120415 | s19 | Intron_2 of 4 |
| rs56340615 | s20 | Intron_3 of 4 |
| rs2071093 | s21 | Exon_5 of 5 |
| rs73204245 | s22 | Intron_1 of 4 |
| rs2269736 | s23 | Exon_1 of 5 |
| rs9837743 | s24 | upstream −2395 bp |
| rs2071092 | s25 | Intron_4 of 4 |
| rs2855552 | s26 | Intron_1 of 4 |
| rs73863103 | s27 | Intron_1 of 4 |
| rs35822883 | s28 | Intron_2 of 4 |
| rs55941599 | s29 | Exon_5 of 5 |
| rs2713629 | s30 | upstream −2434 bp |
| rs80263713 | s31 | Intron_2 of 4 |
| rs77154523 | s32 | Intron_1 of 4 |
| rs115345357 | s33 | Intron_1 of 4 |
| rs146327704 | s34 | Intron_1 of 4 |
| rs187923166 | s35 | Exon_5 of 5 |
| rs78163008 | s36 | Exon_5 of 5 |
| rs146987110 | s37 | upstream −1680 bp |
| rs78872255 | s38 | Intron_1 of 4 |
| rs60744548 | s39 | Intron_1 of 4 |

### Delivery to Cells

[0124] The RNA molecule compositions described herein may be delivered to a target cell by any suitable means. RNA molecule compositions of the present invention may be targeted to any cell which contains and/or expresses a dominant negative allele, including any mammalian or plant cell. For example, in one embodiment the RNA molecule specifically targets a mutated Rho allele and the target cell is a retinal cell such as pigment epithelium (RPE), photoreceptors (e.g., rod and cone), glial cells (e.g., Muller), and ganglion cells. Further, the nucleic acid compositions described herein may be delivered as one or more DNA molecules, RNA molecules, Ribonucleoproteins (RNP), nucleic acid vectors, or any combination thereof.

[0125] In some embodiments, the RNA molecule comprises a chemical modification. Non-limiting examples of suitable chemical modifications include 2-0-methyl (M), 2′-0-methyl, 3′phosphorothioate (MS) or 2′-0-methyl, 3′thioPACE (MSP), pseudouridine, and 1-methyl pseudo-uridine. Each possibility represents a separate embodiment of the present invention.

[0126] Any suitable viral vector system may be used to deliver nucleic acid compositions e.g., the RNA molecule compositions of the subject invention. Conventional viral and non-viral based gene transfer methods can be used to introduce nucleic acids and target tissues. In certain embodiments, nucleic acids are administered for in vivo or ex vivo gene therapy uses. Non-viral vector delivery systems include naked nucleic acid, and nucleic acid complexed with a delivery vehicle such as a liposome or poloxamer. For a review of gene therapy procedures, see Anderson (1992) Science 256:808-813; Nabel & Felgner (1993) TIBTECH 11:211-217; Mitani & Caskey (1993) TIBTECH 11:162-166; Dillon (1993) TIBTECH 11:167-175; Miller (1992) Nature 357:455-460; Van Brunt (1988) Biotechnology 6(10):1149-1154; Vigne (1995)

[0127] Restorative Neurology and Neuroscience 8:35-36; Kremer & Perricaudet (1995) British Medical Bulletin 51(1):31-44; Haddada et al. (1995) in Current Topics in Microbiology and Immunology Doerfler and Bohm (eds.); and Yu et al. (1994) Gene Therapy 1:13-26.

[0128] Methods of non-viral delivery of nucleic acids and/or proteins include electroporation, lipofection, microinjection, biolistics, particle gun acceleration, virosomes, liposomes, immunoliposomes, lipid nanoparticles (LNPs), polycation or lipid:nucleic acid conjugates, artificial virions, and agent-enhanced uptake of nucleic acids or can be delivered to plant cells by bacteria or viruses (e.g., Agrobacterium, Rhizobium sp. NGR234, Sinorhizoboiummeliloti, Mesorhizobium loti, tobacco mosaic virus, potato virus X, cauliflower mosaic virus and cassava vein mosaic virus). (See, e.g., Chung et al. (2006) Trends Plant Sci. 11(1):1-4). Sonoporation using, e.g., the Sonitron 2000 system (Rich-Mar), can also be used for delivery of nucleic acids. Cationic-lipid mediated delivery of proteins and/or nucleic acids is also contemplated as an in vivo or in vitro delivery method. (See Zuris et al. (2015) Nat. Biotechnol. 33(1):73-80; see also Coelho et al. (2013) N. Engl. J. Med. 369, 819-829; Judge et al. (2006) Mol. Ther. 13, 494-505; and Basha et al. (2011) Mol. Ther. 19, 2186-2200).

[0129] Additional exemplary nucleic acid delivery systems include those provided by Amaxa™. Biosystems (Cologne, Germany), Maxcyte, Inc. (Rockville, Md.), BTX Molecular Delivery Systems (Holliston, Mass.) and Copernicus Therapeutics Inc., (see, e.g., U.S. Pat. No. 6,008,336). Lipofection is described in e.g., U.S. Pat. Nos. 5,049,386, 4,946,787; and 4,897,355, and lipofection reagents are sold commercially (e.g., Transfectam.™., Lipofectin.™. and Lipofectamine.™. RNAiMAX). Cationic and neutral lipids that are suitable for efficient receptor-recognition lipofection of polynucleotides include those of Felgner, WO 91/17424, WO 91/16024. Delivery can be to cells (ex vivo administration) or target tissues (in vivo administration).

[0130] The preparation of lipid:nucleic acid complexes, including targeted liposomes such as immunolipid complexes, is well known to one of skill in the art (See, e.g., Crystal (1995) Science 270:404-410; Blaese et al. (1995) Cancer Gene Ther. 2:291-297; Behr et al. (1994) Bioconjugate Chem. 5:382-389; Remy et al. (1994) Bioconjugate Chem. 5:647-654; Gao et al. (1995) Gene Therapy 2:710-722; Ahmad et al. (1992) Cancer Res. 52:4817-4820; U.S. Pat. Nos. 4,186,183, 4,217,344, 4,235,871, 4,261,975, 4,485,054, 4,501,728, 4,774,085, 4,837,028, and 4,946,787).

[0131] Additional methods of delivery include the use of packaging the nucleic acids to be delivered into EnGenelC delivery vehicles (EDVs). These EDVs are specifically delivered to target tissues using bispecific antibodies where one arm of the antibody has specificity for the target tissue and the other has specificity for the EDV. The antibody brings the EDVs to the target cell surface and then the EDV is brought into the cell by endocytosis. Once in the cell, the contents are released (See MacDiarmid et al (2009) Nature Biotechnology 27(7):643).

[0132] The use of RNA or DNA viral based systems for viral mediated delivery of nucleic acids take advantage of highly evolved processes for targeting a virus to specific cells in the body and trafficking the viral payload to the nucleus. Viral vectors can be administered directly to patients (in vivo) or they can be used to treat cells in vitro and the modified cells are administered to patients (ex vivo). Conventional viral based systems for the delivery of nucleic acids include, but are not limited to, retroviral, lentivirus, adenoviral, adeno-associated, vaccinia and herpes simplex virus vectors for gene transfer.

[0133] The tropism of a retrovirus can be altered by incorporating foreign envelope proteins, expanding the potential target population of target cells. Lentiviral vectors are retroviral vectors that are able to transduce or infect non-dividing cells and typically produce high viral titers.

[0134] Selection of a retroviral gene transfer system depends on the target tissue. Retroviral vectors are comprised of cis-acting long terminal repeats with packaging capacity for up to 6-10 kb of foreign sequence. The minimum cis-acting LTRs are sufficient for replication and packaging of the vectors, which are then used to integrate the therapeutic gene into the target cell to provide permanent transgene expression. Widely used retroviral vectors include those based upon murine leukemia virus (MuLV), gibbon ape leukemia virus (GaLV), Simian Immunodeficiency virus (SIV), human immunodeficiency virus (HIV), and combinations thereof (See, e.g., Buchschacher et al. (1992) J. Virol. 66:2731-2739; Johann et al. (1992) J. Virol. 66:1635-1640; Sommerfelt et al. (1990) Virol. 176:58-59; Wilson et al. (1989) J. Virol. 63:2374-2378; Miller et al. (1991) J. Virol. 65:2220-2224; PCT/US94/05700).

[0135] At least six viral vector approaches are currently available for gene transfer in clinical trials, which utilize approaches that involve complementation of defective vectors by genes inserted into helper cell lines to generate the transducing agent.

[0136] pLASN and MFG-S are examples of retroviral vectors that have been used in clinical trials (Dunbar et al. (1995) Blood 85:3048-305; Kohn et al.(1995) Nat. Med. 1:1017-102;

[0137] Malech et al. (1997) PNAS 94:22 12133-12138). PA317/pLASN was the first therapeutic vector used in a gene therapy trial. (Blaese et al. (1995). Transduction efficiencies of 50% or greater have been observed for MFG-S packaged vectors. (Ellem et al. (1997) Immunol Immunother. 44(1):10-20; Dranoff et al. (1997) Hum. Gene Ther. 1:111-2).

[0138] Packaging cells are used to form virus particles that are capable of infecting a host cell. Such cells include 293 cells, which package adenovirus, AAV, and Psi-2 cells or PA317 cells, which package retrovirus. Viral vectors used in gene therapy are usually generated by a producer cell line that packages a nucleic acid vector into a viral particle. The vectors typically contain the minimal viral sequences required for packaging and subsequent integration into a host (if applicable), other viral sequences being replaced by an expression cassette encoding the protein to be expressed. The missing viral functions are supplied in trans by the packaging cell line. For example, AAV vectors used in gene therapy typically only possess inverted terminal repeat (ITR) sequences from the AAV genome which are required for packaging and integration into the host genome. Viral DNA is packaged in a cell line, which contains a helper plasmid encoding the other AAV genes, namely rep and cap, but lacking ITR sequences. The cell line is also infected with adenovirus as a helper. The helper virus promotes replication of the AAV vector and expression of AAV genes from the helper plasmid. The helper plasmid is not packaged in significant amounts due to a lack of ITR sequences. Contamination with adenovirus can be reduced by, e.g., heat treatment to which adenovirus is more sensitive than AAV. Additionally, AAV can be produced at clinical scale using baculovirus systems (see U.S. Pat. No. 7,479,554).

[0139] In many gene therapy applications, it is desirable that the gene therapy vector be delivered with a high degree of specificity to a particular tissue type. Accordingly, a viral vector can be modified to have specificity for a given cell type by expressing a ligand as a fusion protein with a viral coat protein on the outer surface of the virus. The ligand is chosen to have affinity for a receptor known to be present on the cell type of interest. For example, Han et al. (1995) Proc. Natl. Acad. Sci. USA 92:9747-9751, reported that Moloney murine leukemia virus can be modified to express human heregulin fused to gp70, and the recombinant virus infects certain human breast cancer cells expressing human epidermal growth factor receptor. This principle can be extended to other virus-target cell pairs, in which the target cell expresses a receptor and the virus expresses a fusion protein comprising a ligand for the cell-surface receptor. For example, filamentous phage can be engineered to display antibody fragments (e.g., FAB or Fv) having specific binding affinity for virtually any chosen cellular receptor. Although the above description applies primarily to viral vectors, the same principles can be applied to nonviral vectors. Such vectors can be engineered to contain specific uptake sequences which favor uptake by specific target cells.

[0140] Gene therapy vectors can be delivered in vivo by administration to an individual patient, typically by systemic administration (e.g., intravitreal, intravenous, intraperitoneal, intramuscular, subdermal, or intracranial infusion) or topical application, as described below. Alternatively, vectors can be delivered to cells ex vivo, such as cells explanted from an individual patient (e.g., lymphocytes, bone marrow aspirates, tissue biopsy) or universal donor hematopoietic stem cells, followed by reimplantation of the cells into a patient, usually after selection for cells which have incorporated the vector.

[0141] Ex vivo cell transfection for diagnostics, research, or for gene therapy (e.g., via re-infusion of the transfected cells into the host organism) is well known to those of skill in the art. In a preferred embodiment, cells are isolated from the subject organism, transfected with a nucleic acid composition, and re-infused back into the subject organism (e.g., patient). Various cell types suitable for ex vivo transfection are well known to those of skill in the art (See, e.g., Freshney et al. (1994) Culture of Animal Cells, A Manual of Basic Technique, 3rd ed, and the references cited therein for a discussion of how to isolate and culture cells from patients).

[0142] Suitable cells include, but are not limited to, eukaryotic cells and/or cell lines. Non-limiting examples of such cells or cell lines generated from such cells include COS, CHO (e.g., CHO-S, CHO-K1, CHO-DG44, CHO-DUXB11, CHO-DUKX, CHOK1SV), VERO, MDCK, WI38, V79, B14AF28-G3, BHK, HaK, NSO, SP2/0-Ag14, HeLa, HEK293 (e.g., HEK293-F, HEK293-H, HEK293-T), perC6 cells, any plant cell (differentiated or undifferentiated), as well as insect cells such as Spodopterafugiperda (Sf), or fungal cells such as Saccharomyces, Pichia and Schizosaccharomyces. In certain embodiments, the cell line is a CHO-K1, MDCK or HEK293 cell line. Additionally, primary cells may be isolated and used ex vivo for reintroduction into the subject to be treated following treatment with a guided nuclease system (e.g. CRISPR/Cas). Suitable primary cells include peripheral blood mononuclear cells (PBMC), and other blood cell subsets such as, but not limited to, CD4+ T cells or CD8+ T cells. Suitable cells also include stem cells such as, by way of example, embryonic stem cells, induced pluripotent stem cells, hematopoietic stem cells (CD34+), neuronal stem cells and mesenchymal stem cells.

[0143] In one embodiment, stem cells are used in ex vivo procedures for cell transfection and gene therapy. The advantage to using stem cells is that they can be differentiated into other cell types in vitro, or can be introduced into a mammal (such as the donor of the cells) where they will engraft in the bone marrow. Methods for differentiating CD34+cells in vitro into clinically important immune cell types using cytokines such a GM-CSF, IFN-gamma, and TNF-alpha are known (as a non-limiting example see, Inaba et al., J. Exp. Med. 176:1693-1702 (1992)).

[0144] Stem cells are isolated for transduction and differentiation using known methods. For example, stem cells are isolated from bone marrow cells by panning the bone marrow cells with antibodies which bind unwanted cells, such as CD4+ and CD8+ (T cells), CD45+ (panB cells), GR-1 (granulocytes), and Iad (differentiated antigen presenting cells) (as a non-limiting example see Inaba et al. (1992) J. Exp. Med. 176:1693-1702). Stem cells that have been modified may also be used in some embodiments.

[0145] Any one of the RNA molecule compositions described herein is suitable for genome editing in post-mitotic cells or any cell which is not actively dividing, e.g., arrested cells. Examples of post-mitotic cells which may be edited using a composition of the present invention include, but are not limited to, a photoreceptor cell, a rod photoreceptor cell, a cone photoreceptor cell, a retinal pigment epithelium (RPE), a glial cell, Muller cell, and a ganglion.

[0146] Vectors (e.g., retroviruses, liposomes, etc.) containing therapeutic nucleic acid compositions can also be administered directly to an organism for transduction of cells in vivo. Administration is by any of the routes normally used for introducing a molecule into ultimate contact with blood or tissue cells including, but not limited to, injection, infusion, topical application (e.g., eye drops and cream) and electroporation. Suitable methods of administering such nucleic acids are available and well known to those of skill in the art, and, although more than one route can be used to administer a particular composition, a particular route can often provide a more immediate and more effective reaction than another route. According to some embodiments, the composition is delivered via sub-retinal injection. According to some embodiments, the composition is delivered via intravitreal injection.

[0147] Vectors suitable for introduction of transgenes into immune cells (e.g., T-cells) include non-integrating lentivirus vectors. See, e.g., U.S. Patent Publication No. 2009-0117617.

[0148] Pharmaceutically acceptable carriers are determined in part by the particular composition being administered, as well as by the particular method used to administer the composition. Accordingly, there is a wide variety of suitable formulations of pharmaceutical compositions available, as described below (See, e.g., Remington's Pharmaceutical Sciences, 17th ed., 1989).

[0149] In accordance with some embodiments, there is provided an RNA molecule which binds to/ associates with and/or directs the RNA guided DNA nuclease to a sequence comprising at least one nucleotide which differs between a mutated allele and a functional allele (e.g., SNP) of a gene of interest (i.e., a sequence of the mutated allele which is not present in the functional allele). The sequence may be within the disease associated mutation. The sequence may be upstream or downstream to the disease associated mutation. Any sequence difference between the mutated allele and the functional allele may be targeted by an RNA molecule of the present invention to inactivate the mutant allele, or otherwise disable its dominant disease-causing effects, while preserving the activity of the functional allele.

[0150] The disclosed compositions and methods may also be used in the manufacture of a medicament for treating dominant genetic disorders in a patient.

Examples of RNA Guide Sequences which Specifically Target Mutated Alleles of Rho Gene

[0151] Although a large number of guide sequences can be designed to target a mutated allele, the nucleotide sequences described in Tables 2 identified by SEQ ID NOs: 1-3010 below were specifically selected to effectively implement the methods set forth herein and to effectively discriminate between alleles.

[0152] Referring to columns 1-4, each of SEQ ID NOs. 1-3010 indicated in column 1 corresponds to an engineered guide sequence. The corresponding SNP details are indicated in column 2. The SNP details indicated in the 2nd column include the assigned identifier for each SNP corresponding to a SNP ID indicated in Table 1. Column 3 indicates whether the target of each guide sequence is the Rho gene polymorph or wild type (REF) sequence. Column 4 indicates the guanine-cytosine content of each guide sequence.

[0153] Table 2 shows guide sequences designed for use as described in the embodiments above to associate with different SNPs within a sequence of a mutated Rho allele. Each engineered guide molecule is further designed such as to associate with a target genomic DNA sequence of interest that lies next to a protospacer adjacent motif (PAM), e.g., a PAM matching the sequence NGG or NAG, where “N” is any nucleobase. The guide sequences were designed to work in conjunction with one or more different CRISPR nucleases, including, but not limited to, e.g. SpCas9WT (PAM SEQ: NGG), SpCas9.VQR.1 (PAM SEQ: NGAN), SpCas9.VQR.2 (PAM SEQ: NGNG), SpCas9.EQR (PAM SEQ: NGAG), SpCas9.VRER (PAM SEQ: NGCG), SaCas9WT (PAM SEQ: NNGRRT), NmCas9WT (PAM SEQ: NNNNGATT), Cpf1 (PAM SEQ: TTTV), or JeCas9WT (PAM SEQ: NNNVRYM). RNA molecules of the present invention are each designed to form complexes in conjunction with one or more different CRISPR nucleases and designed to target polynucleotide sequences of interest utilizing one or more different PAM sequences respective to the CRISPR nuclease utilized

TABLE 2
Guide sequences designed to associate
with specific SNPs of the Rho gene

| SEQ | SNP | | |
|---|---|---|---|
| ID | ID | | |
| NO: | (Table 1) | Target (SNP/REF) | % GC |
| 1 | s1 | REF, SNP | 50% |
| 2 | s1 | REF, SNP | 50% |
| 3 | s2 | REF, SNP | 60% |
| 4 | s2, s3 | REF, REF, SNP | 50% |
| 5 | s2, s3 | REF, REF, SNP | 50% |
| 6 | s2, s3 | REF, REF | 45% |
| 7 | s2, s3 | REF, REF | 55% |
| 8 | s2, s3 | REF, REF | 55% |
| 9 | s2, s3 | REF, REF | 55% |
| 10 | s2, s3 | REF, REF | 55% |
| 11 | s2, s3 | REF, REF | 55% |
| 12 | s2, s3 | REF, REF | 45% |
| 13 | s4 | REF, SNP | 60% |
| 14 | s4 | REF, SNP | 60% |
| 15 | s4 | REF, SNP | 55% |
| 16 | s5 | REF, SNP | 60% |
| 17 | s5 | REF, SNP | 45% |
| 18 | s7 | REF, SNP | 60% |
| 19 | s7 | REF, SNP | 60% |
| 20 | s7 | REF, SNP | 70% |
| 21 | s7 | REF, SNP | 65% |
| 22 | s8 | REF, SNP | 60% |
| 23 | s8 | REF, SNP | 55% |
| 24 | s9 | REF, SNP | 35% |
| 25 | s9 | REF, SNP | 55% |
| 26 | s9 | REF, SNP | 60% |
| 27 | s10 | REF, SNP | 60% |
| 28 | s10 | REF, SNP | 60% |
| 29 | s11 | REF, SNP | 65% |
| 30 | s11 | REF, SNP | 70% |
| 31 | s12 | REF, SNP | 60% |
| 32 | s12 | REF, SNP | 70% |
| 33 | s3 | REF, SNP | 65% |
| 34 | s3 | REF, SNP | 70% |
| 35 | s13 | REF, SNP | 60% |
| 36 | s13 | REF, SNP | 55% |
| 37 | s13, s14 | REF, REF, SNP | 65% |
| 38 | s13, s14 | REF, REF | 60% |
| 39 | s13, s14 | REF, REF | 60% |
| 40 | s13, s14 | REF, REF | 55% |
| 41 | s15 | REF, SNP | 55% |
| 42 | s15 | REF, SNP | 55% |
| 43 | s17 | REF, SNP | 35% |
| 44 | s17 | REF, SNP | 40% |
| 45 | s17, s18 | REF, REF | 50% |
| 46 | s17, s18 | REF, REF | 45% |
| 47 | s19 | REF, SNP | 60% |
| 48 | s19 | REF, SNP | 65% |
| 49 | s20 | REF, SNP | 55% |
| 50 | s20 | REF, SNP | 50% |
| 51 | s21 | REF, SNP | 65% |
| 52 | s21 | REF, SNP | 65% |
| 53 | s21 | REF, SNP | 60% |
| 54 | s22 | REF, SNP | 55% |
| 55 | s22 | REF, SNP | 50% |
| 56 | s22 | REF, SNP | 55% |
| 57 | s23 | REF, SNP | 60% |
| 58 | s23 | REF, SNP | 60% |
| 59 | s23 | REF, SNP | 60% |
| 60 | s24 | REF, SNP | 55% |
| 61 | s14 | REF, SNP | 60% |
| 62 | s25 | REF, SNP | 75% |
| 63 | s25 | REF, SNP | 55% |
| 64 | s26 | REF, SNP | 50% |
| 65 | s26 | REF, SNP | 45% |
| 66 | s26 | REF, SNP | 50% |
| 67 | s26 | REF, SNP | 55% |
| 68 | s27 | REF, SNP | 55% |
| 69 | s27 | REF, SNP | 55% |
| 70 | s27 | REF, SNP | 50% |
| 71 | s18 | REF, SNP | 60% |
| 72 | s18 | REF, SNP | 60% |
| 73 | s28 | REF, SNP | 35% |
| 74 | s28 | REF, SNP | 60% |
| 75 | s28 | REF, SNP | 65% |
| 76 | s28 | REF, SNP | 65% |
| 77 | s29 | REF, SNP | 45% |
| 78 | s29 | REF, SNP | 45% |
| 79 | s29 | REF, SNP | 40% |
| 80 | s31 | REF, SNP | 70% |
| 81 | s31 | REF, SNP | 70% |
| 82 | s32 | REF, SNP | 60% |
| 83 | s32 | REF, SNP | 65% |
| 84 | s32 | REF, SNP | 60% |
| 85 | s33 | REF, SNP | 40% |
| 86 | s34 | REF, SNP | 40% |
| 87 | s34 | REF, SNP | 40% |
| 88 | s34 | REF, SNP | 40% |
| 89 | s34 | REF, SNP | 45% |
| 90 | s34 | REF, SNP | 45% |
| 91 | s34 | REF, SNP | 40% |
| 92 | s34 | REF, SNP | 45% |
| 93 | s34 | REF, SNP | 40% |
| 94 | s34 | REF, SNP | 40% |
| 95 | s34 | REF, SNP | 45% |
| 96 | s34 | REF, SNP | 40% |
| 97 | s34 | REF, SNP | 45% |
| 98 | s34 | REF, SNP | 40% |
| 99 | s34 | REF, SNP | 40% |
| 100 | s34 | REF, SNP | 40% |
| 101 | s35, s1 | REF, REF, SNP | 65% |
| 102 | s35, s1 | REF, REF, SNP | 60% |
| 103 | s35, s1 | REF, REF, SNP | 65% |
| 104 | s35, s1 | REF, REF, SNP | 70% |
| 105 | s35, s1 | REF, REF, SNP | 65% |
| 106 | s35, s1 | REF, REF, SNP | 60% |
| 107 | s35, s1 | REF, REF, SNP | 65% |
| 108 | s35, s1 | REF, REF, SNP | 65% |
| 109 | s35, s1 | REF, REF, SNP | 65% |
| 110 | s35 | REF, SNP | 65% |
| 111 | s36 | REF, SNP | 60% |
| 112 | s37 | REF, SNP | 50% |
| 113 | s37 | REF, SNP | 55% |
| 114 | s37 | REF, SNP | 60% |
| 115 | s38 | REF, SNP | 65% |
| 116 | s38 | REF, SNP | 70% |
| 117 | s38 | REF, SNP | 70% |
| 118 | s2 | REF | 50% |
| 119 | s2 | SNP | 55% |
| 120 | s2 | SNP | 50% |
| 121 | s2 | SNP | 60% |
| 122 | s2 | REF | 55% |
| 123 | s2 | REF | 55% |
| 124 | s2 | SNP | 60% |
| 125 | s2 | SNP | 60% |
| 126 | s2 | SNP | 60% |
| 127 | s2 | SNP | 55% |
| 128 | s2 | REF | 55% |
| 129 | s2 | SNP | 60% |
| 130 | s2 | SNP | 55% |
| 131 | s2 | REF | 50% |
| 132 | s2 | REF | 50% |
| 133 | s2 | SNP | 55% |
| 134 | s2 | SNP | 60% |
| 135 | s2 | REF | 60% |
| 136 | s2 | SNP | 65% |
| 137 | s2 | SNP | 60% |
| 138 | s2 | REF | 55% |
| 139 | s2 | SNP | 60% |
| 140 | s2 | SNP | 60% |
| 141 | s2 | SNP | 55% |
| 142 | s2 | SNP | 55% |
| 143 | s2 | REF | 50% |
| 144 | s2 | REF | 50% |
| 145 | s2 | SNP | 55% |
| 146 | s2 | SNP | 50% |
| 147 | s4 | SNP | 70% |
| 148 | s4 | SNP | 60% |
| 149 | s4 | SNP | 65% |
| 150 | s4 | REF | 60% |
| 151 | s4 | SNP | 65% |
| 152 | s4 | REF | 65% |
| 153 | s4 | SNP | 70% |
| 154 | s4 | SNP | 65% |
| 155 | s4 | SNP | 65% |
| 156 | s4 | REF | 60% |
| 157 | s4 | REF | 60% |
| 158 | s4 | SNP | 65% |
| 159 | s4 | SNP | 65% |
| 160 | s4 | SNP | 65% |
| 161 | s4 | REF | 60% |
| 162 | s4 | SNP | 65% |
| 163 | s4 | REF | 60% |
| 164 | s5 | REF | 45% |
| 165 | s5 | SNP | 45% |
| 166 | s5 | REF | 55% |
| 167 | s5 | SNP | 55% |
| 168 | s5 | REF | 50% |
| 169 | s5 | SNP | 50% |
| 170 | s5 | REF | 40% |
| 171 | s5 | SNP | 40% |
| 172 | s5 | REF | 55% |
| 173 | s5 | REF | 55% |
| 174 | s5 | SNP | 55% |
| 175 | s5 | REF | 55% |
| 176 | s5 | SNP | 55% |
| 177 | s5 | SNP | 55% |
| 178 | s5 | REF | 55% |
| 179 | s5 | SNP | 60% |
| 180 | s5 | REF | 60% |
| 181 | s5 | REF | 55% |
| 182 | s5 | SNP | 55% |
| 183 | s5 | REF | 60% |
| 184 | s5 | SNP | 40% |
| 185 | s5 | SNP | 50% |
| 186 | s5 | REF | 50% |
| 187 | s5 | REF | 65% |
| 188 | s5 | SNP | 45% |
| 189 | s5 | SNP | 65% |
| 190 | s5 | REF | 45% |
| 191 | s5 | SNP | 60% |
| 192 | s5 | REF | 40% |
| 193 | s5 | SNP | 55% |
| 194 | s6 | SNP | 60% |
| 195 | s6 | SNP | 60% |
| 196 | s6 | SNP | 60% |
| 197 | s6 | SNP | 55% |
| 198 | s6 | SNP | 55% |
| 199 | s6 | SNP | 55% |
| 200 | s6 | SNP | 60% |
| 201 | s7 | REF | 70% |
| 202 | s7 | SNP | 75% |
| 203 | s7 | REF | 65% |
| 204 | s7 | SNP | 70% |
| 205 | s7 | REF | 70% |
| 206 | s7 | REF | 65% |
| 207 | s7 | SNP | 70% |
| 208 | s7 | SNP | 80% |
| 209 | s7 | REF | 75% |
| 210 | s7 | SNP | 75% |
| 211 | s7 | REF | 70% |
| 212 | s7 | SNP | 75% |
| 213 | s7 | REF | 75% |
| 214 | s7 | SNP | 80% |
| 215 | s7 | REF | 65% |
| 216 | s7 | SNP | 70% |
| 217 | s7 | SNP | 75% |
| 218 | s7 | REF | 70% |
| 219 | s7 | REF | 60% |
| 220 | s7 | SNP | 65% |
| 221 | s7 | REF | 70% |
| 222 | s7 | SNP | 75% |
| 223 | s8 | SNP | 60% |
| 224 | s8 | REF | 55% |
| 225 | s8 | SNP | 55% |
| 226 | s8 | REF | 50% |
| 227 | s8 | SNP | 65% |
| 228 | s8 | REF | 60% |
| 229 | s8 | SNP | 65% |
| 230 | s8 | REF | 50% |
| 231 | s8 | SNP | 55% |
| 232 | s8 | SNP | 70% |
| 233 | s8 | REF | 65% |
| 234 | s8 | REF | 50% |
| 235 | s8 | SNP | 55% |
| 236 | s8 | REF | 55% |
| 237 | s8 | SNP | 60% |
| 238 | s8 | SNP | 55% |
| 239 | s8 | REF | 50% |
| 240 | s8 | REF | 60% |
| 241 | s8 | SNP | 65% |
| 242 | s8 | REF | 60% |
| 243 | s9 | REF | 40% |
| 244 | s9 | SNP | 60% |
| 245 | s9 | SNP | 45% |
| 246 | s9 | REF | 55% |
| 247 | s9 | REF | 40% |
| 248 | s9 | SNP | 45% |
| 249 | s9 | SNP | 65% |
| 250 | s9 | REF | 60% |
| 251 | s9 | SNP | 60% |
| 252 | s9 | REF | 55% |
| 253 | s9 | SNP | 55% |
| 254 | s9 | REF | 50% |
| 255 | s9 | REF | 60% |
| 256 | s9 | SNP | 65% |
| 257 | s9 | REF | 50% |
| 258 | s9 | SNP | 55% |
| 259 | s9 | REF | 40% |
| 260 | s9 | SNP | 45% |
| 261 | s9 | REF | 55% |
| 262 | s9 | SNP | 60% |
| 263 | s9 | REF | 60% |
| 264 | s9 | SNP | 65% |
| 265 | s9 | REF | 55% |
| 266 | s9 | SNP | 60% |
| 267 | s9 | REF | 50% |
| 268 | s9 | SNP | 55% |
| 269 | s10 | SNP | 55% |
| 270 | s10 | REF | 60% |
| 271 | s10 | SNP | 60% |
| 272 | s10 | REF | 65% |
| 273 | s10 | SNP | 55% |
| 274 | s10 | REF | 60% |
| 275 | s10 | REF | 65% |
| 276 | s10 | SNP | 60% |
| 277 | s10 | REF | 60% |
| 278 | s10 | SNP | 55% |
| 279 | s10 | SNP | 60% |
| 280 | s10 | REF | 65% |
| 281 | s10 | REF | 65% |
| 282 | s10 | SNP | 60% |
| 283 | s10 | REF | 65% |
| 284 | s10 | SNP | 60% |
| 285 | s10 | REF | 55% |
| 286 | s10 | REF | 60% |
| 287 | s10 | REF | 65% |
| 288 | s10 | SNP | 60% |
| 289 | s10 | REF | 65% |
| 290 | s10 | SNP | 60% |
| 291 | s10 | SNP | 55% |
| 292 | s10 | SNP | 50% |
| 293 | s10 | REF | 55% |
| 294 | s10 | SNP | 50% |
| 295 | s10 | REF | 65% |
| 296 | s10 | SNP | 60% |
| 297 | s11 | REF | 70% |
| 298 | s11 | SNP | 65% |
| 299 | s11 | SNP | 65% |
| 300 | s11 | REF | 80% |
| 301 | s11 | REF | 70% |
| 302 | s11 | SNP | 65% |
| 303 | s11 | SNP | 75% |
| 304 | s11 | REF | 75% |
| 305 | s11 | SNP | 70% |
| 306 | s11 | SNP | 75% |
| 307 | s11 | REF | 80% |
| 308 | s11 | REF | 70% |
| 309 | s11 | SNP | 65% |
| 310 | s11 | REF | 70% |
| 311 | s11 | REF | 75% |
| 312 | s11 | SNP | 70% |
| 313 | s11 | REF | 75% |
| 314 | s11 | SNP | 70% |
| 315 | s11 | REF | 65% |
| 316 | s11 | SNP | 60% |
| 317 | s11 | REF | 70% |
| 318 | s11 | SNP | 65% |
| 319 | s12 | SNP | 70% |
| 320 | s12 | REF | 65% |
| 321 | s12 | SNP | 70% |
| 322 | s12 | REF | 65% |
| 323 | s12 | SNP | 70% |
| 324 | s12 | REF | 65% |
| 325 | s12 | REF | 70% |
| 326 | s12 | SNP | 75% |
| 327 | s12 | REF | 70% |
| 328 | s12 | SNP | 75% |
| 329 | s12 | REF | 70% |
| 330 | s12 | SNP | 75% |
| 331 | s12 | SNP | 80% |
| 332 | s12 | REF | 75% |
| 333 | s12 | SNP | 75% |
| 334 | s12 | REF | 70% |
| 335 | s12 | SNP | 75% |
| 336 | s12 | REF | 70% |
| 337 | s12 | SNP | 70% |
| 338 | s12 | SNP | 70% |
| 339 | s12 | REF | 65% |
| 340 | s12 | SNP | 70% |
| 341 | s12 | REF | 65% |
| 342 | s12 | SNP | 70% |
| 343 | s12 | REF | 65% |
| 344 | s12 | SNP | 70% |
| 345 | s12 | REF | 65% |
| 346 | s12 | REF | 70% |
| 347 | s12 | SNP | 75% |
| 348 | s12 | REF | 70% |
| 349 | s12 | SNP | 75% |
| 350 | s12 | REF | 70% |
| 351 | s12 | SNP | 75% |
| 352 | s12 | REF | 65% |
| 353 | s3 | SNP | 60% |
| 354 | s3 | SNP | 60% |
| 355 | s3 | SNP | 60% |
| 356 | s3 | SNP | 50% |
| 357 | s3 | SNP | 60% |
| 358 | s3 | SNP | 60% |
| 359 | s3 | REF | 70% |
| 360 | s3 | SNP | 75% |
| 361 | s3 | SNP | 75% |
| 362 | s3 | REF | 70% |
| 363 | s3 | SNP | 65% |
| 364 | s3 | REF | 60% |
| 365 | s3 | SNP | 50% |
| 366 | s13 | SNP | 55% |
| 367 | s13 | REF | 60% |
| 368 | s13 | SNP | 45% |
| 369 | s13 | REF | 50% |
| 370 | s13 | REF | 50% |
| 371 | s13 | SNP | 45% |
| 372 | s13 | REF | 50% |
| 373 | s13 | SNP | 45% |
| 374 | s13 | SNP | 55% |
| 375 | s13 | REF | 60% |
| 376 | s13 | SNP | 60% |
| 377 | s13 | SNP | 55% |
| 378 | s13 | SNP | 55% |
| 379 | s13 | SNP | 65% |
| 380 | s13 | REF | 70% |
| 381 | s13 | SNP | 45% |
| 382 | s13 | REF | 50% |
| 383 | s13 | REF | 50% |
| 384 | s13 | SNP | 45% |
| 385 | s13 | SNP | 50% |
| 386 | s15 | SNP | 50% |
| 387 | s15 | REF | 55% |
| 388 | s15 | SNP | 45% |
| 389 | s15 | REF | 50% |
| 390 | s15 | REF | 55% |
| 391 | s15 | SNP | 50% |
| 392 | s15 | SNP | 50% |
| 393 | s15 | REF | 55% |
| 394 | s15 | SNP | 50% |
| 395 | s15 | REF | 55% |
| 396 | s15 | SNP | 50% |
| 397 | s15 | REF | 55% |
| 398 | s15 | SNP | 50% |
| 399 | s15 | REF | 55% |
| 400 | s15 | SNP | 55% |
| 401 | s15 | REF | 60% |
| 402 | s15 | REF | 50% |
| 403 | s15 | SNP | 45% |
| 404 | s15 | SNP | 50% |
| 405 | s15 | REF | 55% |
| 406 | s15 | REF | 50% |
| 407 | s15 | SNP | 45% |
| 408 | s15 | REF | 55% |
| 409 | s15 | SNP | 50% |
| 410 | s15 | REF | 50% |
| 411 | s15 | SNP | 45% |
| 412 | s16 | SNP | 55% |
| 413 | s16 | REF | 50% |
| 414 | s16 | SNP | 65% |
| 415 | s16 | REF | 60% |
| 416 | s16 | REF | 60% |
| 417 | s16 | SNP | 65% |
| 418 | s16 | SNP | 60% |
| 419 | s16 | SNP | 60% |
| 420 | s16 | REF | 55% |
| 421 | s16 | REF | 55% |
| 422 | s16 | SNP | 60% |
| 423 | s16 | SNP | 65% |
| 424 | s16 | REF | 60% |
| 425 | s16 | REF | 50% |
| 426 | s16 | SNP | 55% |
| 427 | s16 | REF | 55% |
| 428 | s16 | REF | 55% |
| 429 | s16 | SNP | 60% |
| 430 | s16 | SNP | 60% |
| 431 | s16 | REF | 55% |
| 432 | s16 | SNP | 60% |
| 433 | s16 | REF | 55% |
| 434 | s16 | SNP | 60% |
| 435 | s16 | REF | 55% |
| 436 | s16 | REF | 55% |
| 437 | s16 | SNP | 60% |
| 438 | s39 | SNP | 45% |
| 439 | s39 | SNP | 45% |
| 440 | s39 | SNP | 45% |
| 441 | s39 | SNP | 45% |
| 442 | s39 | SNP | 45% |
| 443 | s39 | SNP | 45% |
| 444 | s39 | SNP | 45% |
| 445 | s39 | SNP | 45% |
| 446 | s39 | SNP | 45% |
| 447 | s39 | SNP | 45% |
| 448 | s39 | SNP | 45% |
| 449 | s39 | SNP | 45% |
| 450 | s39 | SNP | 45% |
| 451 | s39 | SNP | 45% |
| 452 | s39 | SNP | 45% |
| 453 | s39 | SNP | 45% |
| 454 | s39 | SNP | 45% |
| 455 | s17 | REF | 40% |
| 456 | s17 | SNP | 45% |
| 457 | s17 | SNP | 45% |
| 458 | s17 | REF | 40% |
| 459 | s17 | REF | 40% |
| 460 | s17 | SNP | 45% |
| 461 | s17 | SNP | 50% |
| 462 | s17 | SNP | 55% |
| 463 | s19 | REF | 60% |
| 464 | s19 | SNP | 55% |
| 465 | s19 | REF | 60% |
| 466 | s19 | SNP | 55% |
| 467 | s19 | SNP | 55% |
| 468 | s19 | REF | 60% |
| 469 | s19 | SNP | 55% |
| 470 | s19 | REF | 60% |
| 471 | s19 | SNP | 60% |
| 472 | s19 | REF | 65% |
| 473 | s19 | SNP | 60% |
| 474 | s19 | REF | 65% |
| 475 | s19 | SNP | 55% |
| 476 | s19 | REF | 60% |
| 477 | s19 | REF | 65% |
| 478 | s19 | SNP | 60% |
| 479 | s19 | REF | 65% |
| 480 | s19 | SNP | 60% |
| 481 | s19 | REF | 65% |
| 482 | s19 | SNP | 60% |
| 483 | s19 | SNP | 60% |
| 484 | s19 | REF | 65% |
| 485 | s19 | SNP | 65% |
| 486 | s19 | SNP | 60% |
| 487 | s19 | REF | 65% |
| 488 | s19 | SNP | 60% |
| 489 | s19 | REF | 65% |
| 490 | s19 | SNP | 55% |
| 491 | s19 | REF | 60% |
| 492 | s19 | SNP | 60% |
| 493 | s19 | REF | 65% |
| 494 | s19 | REF | 70% |
| 495 | s19 | SNP | 55% |
| 496 | s19 | REF | 60% |
| 497 | s19 | SNP | 60% |
| 498 | s19 | REF | 65% |
| 499 | s20 | REF | 65% |
| 500 | s20 | SNP | 60% |
| 501 | s20 | REF | 80% |
| 502 | s20 | SNP | 75% |
| 503 | s20 | REF | 75% |
| 504 | s20 | SNP | 70% |
| 505 | s20 | SNP | 55% |
| 506 | s20 | SNP | 75% |
| 507 | s20 | REF | 80% |
| 508 | s20 | SNP | 65% |
| 509 | s20 | REF | 70% |
| 510 | s20 | SNP | 65% |
| 511 | s20 | REF | 70% |
| 512 | s20 | REF | 60% |
| 513 | s20 | REF | 70% |
| 514 | s20 | SNP | 65% |
| 515 | s20 | REF | 70% |
| 516 | s20 | SNP | 65% |
| 517 | s20 | REF | 55% |
| 518 | s20 | SNP | 50% |
| 519 | s20 | REF | 80% |
| 520 | s20 | SNP | 75% |
| 521 | s20 | REF | 80% |
| 522 | s20 | SNP | 75% |
| 523 | s20 | SNP | 65% |
| 524 | s20 | REF | 70% |
| 525 | s20 | REF | 85% |
| 526 | s20 | SNP | 80% |
| 527 | s20 | REF | 70% |
| 528 | s20 | SNP | 65% |
| 529 | s20 | REF | 70% |
| 530 | s20 | SNP | 65% |
| 531 | s21 | SNP | 65% |
| 532 | s21 | SNP | 60% |
| 533 | s21 | REF | 65% |
| 534 | s21 | REF | 70% |
| 535 | s21 | SNP | 55% |
| 536 | s21 | REF | 60% |
| 537 | s21 | REF | 65% |
| 538 | s21 | SNP | 60% |
| 539 | s21 | REF | 55% |
| 540 | s21 | REF | 55% |
| 541 | s21 | REF | 65% |
| 542 | s21 | SNP | 60% |
| 543 | s21 | REF | 60% |
| 544 | s21 | REF | 65% |
| 545 | s21 | SNP | 60% |
| 546 | s21 | SNP | 55% |
| 547 | s21 | SNP | 50% |
| 548 | s21 | SNP | 50% |
| 549 | s21 | SNP | 55% |
| 550 | s21 | REF | 60% |
| 551 | s21 | REF | 60% |
| 552 | s21 | SNP | 55% |
| 553 | s21 | REF | 65% |
| 554 | s21 | SNP | 60% |
| 555 | s22 | SNP | 45% |
| 556 | s22 | REF | 50% |
| 557 | s22 | SNP | 50% |
| 558 | s22 | REF | 55% |
| 559 | s22 | SNP | 45% |
| 560 | s22 | REF | 50% |
| 561 | s22 | REF | 50% |
| 562 | s22 | SNP | 45% |
| 563 | s22 | REF | 60% |
| 564 | s22 | SNP | 50% |
| 565 | s22 | REF | 55% |
| 566 | s22 | SNP | 55% |
| 567 | s22 | SNP | 60% |
| 568 | s22 | REF | 65% |
| 569 | s22 | REF | 50% |
| 570 | s22 | SNP | 45% |
| 571 | s22 | REF | 55% |
| 572 | s22 | SNP | 50% |
| 573 | s23 | SNP | 50% |
| 574 | s23 | REF | 55% |
| 575 | s23 | SNP | 50% |
| 576 | s23 | REF | 55% |
| 577 | s23 | REF | 60% |
| 578 | s23 | SNP | 55% |
| 579 | s23 | REF | 60% |
| 580 | s23 | SNP | 55% |
| 581 | s23 | SNP | 50% |
| 582 | s23 | REF | 55% |
| 583 | s23 | REF | 60% |
| 584 | s23 | SNP | 55% |
| 585 | s23 | SNP | 50% |
| 586 | s23 | REF | 55% |
| 587 | s23 | REF | 60% |
| 588 | s23 | SNP | 55% |
| 589 | s23 | SNP | 55% |
| 590 | s23 | REF | 60% |
| 591 | s23 | SNP | 55% |
| 592 | s23 | SNP | 50% |
| 593 | s23 | REF | 55% |
| 594 | s23 | REF | 60% |
| 595 | s24 | REF | 50% |
| 596 | s24 | SNP | 45% |
| 597 | s24 | REF | 45% |
| 598 | s24 | SNP | 40% |
| 599 | s24 | REF | 35% |
| 600 | s24 | SNP | 30% |
| 601 | s24 | REF | 55% |
| 602 | s24 | SNP | 50% |
| 603 | s14 | SNP | 55% |
| 604 | s14 | SNP | 50% |
| 605 | s14 | REF | 55% |
| 606 | s14 | SNP | 50% |
| 607 | s14 | REF | 55% |
| 608 | s14 | SNP | 50% |
| 609 | s14 | REF | 55% |
| 610 | s14 | SNP | 50% |
| 611 | s14 | REF | 55% |
| 612 | s14 | SNP | 55% |
| 613 | s14 | REF | 65% |
| 614 | s14 | SNP | 60% |
| 615 | s14 | REF | 65% |
| 616 | s14 | SNP | 60% |
| 617 | s14 | SNP | 50% |
| 618 | s14 | REF | 60% |
| 619 | s14 | SNP | 55% |
| 620 | s25 | REF | 60% |
| 621 | s25 | SNP | 55% |
| 622 | s25 | REF | 50% |
| 623 | s25 | SNP | 45% |
| 624 | s25 | REF | 60% |
| 625 | s25 | SNP | 55% |
| 626 | s25 | REF | 65% |
| 627 | s25 | SNP | 60% |
| 628 | s25 | REF | 55% |
| 629 | s25 | SNP | 50% |
| 630 | s25 | REF | 75% |
| 631 | s25 | SNP | 70% |
| 632 | s25 | REF | 75% |
| 633 | s25 | SNP | 70% |
| 634 | s26 | REF | 50% |
| 635 | s26 | SNP | 55% |
| 636 | s26 | REF | 50% |
| 637 | s26 | SNP | 55% |
| 638 | s26 | REF | 50% |
| 639 | s26 | REF | 55% |
| 640 | s26 | SNP | 60% |
| 641 | s26 | REF | 50% |
| 642 | s26 | SNP | 55% |
| 643 | s26 | SNP | 55% |
| 644 | s26 | REF | 50% |
| 645 | s26 | SNP | 55% |
| 646 | s26 | SNP | 55% |
| 647 | s26 | REF | 50% |
| 648 | s26 | REF | 55% |
| 649 | s26 | SNP | 60% |
| 650 | s26 | SNP | 55% |
| 651 | s26 | REF | 50% |
| 652 | s26 | SNP | 55% |
| 653 | s26 | REF | 50% |
| 654 | s27 | REF | 55% |
| 655 | s27 | SNP | 50% |
| 656 | s27 | REF | 60% |
| 657 | s27 | SNP | 55% |
| 658 | s27 | REF | 65% |
| 659 | s27 | SNP | 60% |
| 660 | s27 | REF | 60% |
| 661 | s27 | SNP | 55% |
| 662 | s27 | SNP | 55% |
| 663 | s27 | REF | 60% |
| 664 | s27 | REF | 55% |
| 665 | s27 | SNP | 50% |
| 666 | s27 | REF | 55% |
| 667 | s27 | SNP | 50% |
| 668 | s27 | SNP | 50% |
| 669 | s27 | REF | 55% |
| 670 | s18 | REF | 50% |
| 671 | s18 | REF | 50% |
| 672 | s18 | SNP | 50% |
| 673 | s18 | SNP | 50% |
| 674 | s18 | SNP | 50% |
| 675 | s18 | REF | 50% |
| 676 | s18 | SNP | 55% |
| 677 | s18 | REF | 55% |
| 678 | s18 | SNP | 45% |
| 679 | s18 | REF | 50% |
| 680 | s18 | SNP | 50% |
| 681 | s18 | REF | 55% |
| 682 | s18 | SNP | 55% |
| 683 | s18 | REF | 50% |
| 684 | s18 | SNP | 50% |
| 685 | s18 | REF | 50% |
| 686 | s18 | SNP | 50% |
| 687 | s18 | SNP | 50% |
| 688 | s28 | SNP | 50% |
| 689 | s28 | REF | 45% |
| 690 | s28 | SNP | 70% |
| 691 | s28 | REF | 65% |
| 692 | s28 | SNP | 70% |
| 693 | s28 | REF | 55% |
| 694 | s28 | SNP | 60% |
| 695 | s28 | SNP | 70% |
| 696 | s28 | REF | 65% |
| 697 | s28 | REF | 65% |
| 698 | s28 | REF | 45% |
| 699 | s28 | SNP | 50% |
| 700 | s29 | SNP | 40% |
| 701 | s29 | REF | 50% |
| 702 | s29 | SNP | 45% |
| 703 | s29 | REF | 50% |
| 704 | s29 | SNP | 45% |
| 705 | s29 | REF | 50% |
| 706 | s29 | REF | 50% |
| 707 | s29 | SNP | 45% |
| 708 | s29 | SNP | 45% |
| 709 | s29 | REF | 50% |
| 710 | s29 | SNP | 45% |
| 711 | s29 | REF | 45% |
| 712 | s29 | REF | 50% |
| 713 | s29 | SNP | 40% |
| 714 | s29 | REF | 45% |
| 715 | s29 | SNP | 45% |
| 716 | s29 | REF | 50% |
| 717 | s29 | SNP | 45% |
| 718 | s29 | REF | 45% |
| 719 | s29 | SNP | 40% |
| 720 | s31 | REF | 65% |
| 721 | s31 | SNP | 60% |
| 722 | s31 | REF | 60% |
| 723 | s31 | SNP | 55% |
| 724 | s31 | SNP | 60% |
| 725 | s31 | SNP | 55% |
| 726 | s31 | REF | 60% |
| 727 | s31 | REF | 65% |
| 728 | s31 | SNP | 60% |
| 729 | s31 | SNP | 60% |
| 730 | s31 | REF | 65% |
| 731 | s31 | REF | 70% |
| 732 | s31 | SNP | 65% |
| 733 | s31 | REF | 65% |
| 734 | s31 | REF | 60% |
| 735 | s31 | SNP | 55% |
| 736 | s31 | SNP | 55% |
| 737 | s31 | REF | 60% |
| 738 | s32 | REF | 45% |
| 739 | s32 | SNP | 50% |
| 740 | s32 | REF | 55% |
| 741 | s32 | SNP | 60% |
| 742 | s32 | REF | 55% |
| 743 | s32 | SNP | 60% |
| 744 | s32 | REF | 50% |
| 745 | s32 | SNP | 55% |
| 746 | s32 | SNP | 45% |
| 747 | s32 | REF | 40% |
| 748 | s32 | SNP | 60% |
| 749 | s32 | REF | 55% |
| 750 | s32 | REF | 55% |
| 751 | s32 | SNP | 60% |
| 752 | s32 | SNP | 50% |
| 753 | s32 | REF | 45% |
| 754 | s32 | REF | 55% |
| 755 | s32 | SNP | 60% |
| 756 | s32 | REF | 55% |
| 757 | s32 | SNP | 60% |
| 758 | s32 | REF | 60% |
| 759 | s32 | SNP | 65% |
| 760 | s32 | REF | 45% |
| 761 | s32 | SNP | 50% |
| 762 | s32 | SNP | 65% |
| 763 | s32 | SNP | 50% |
| 764 | s32 | REF | 45% |
| 765 | s32 | REF | 60% |
| 766 | s33 | REF | 35% |
| 767 | s33 | SNP | 30% |
| 768 | s33 | REF | 40% |
| 769 | s33 | SNP | 35% |
| 770 | s33 | REF | 40% |
| 771 | s33 | SNP | 35% |
| 772 | s33 | SNP | 35% |
| 773 | s33 | REF | 40% |
| 774 | s33 | SNP | 35% |
| 775 | s33 | REF | 40% |
| 776 | s33 | REF | 40% |
| 777 | s33 | SNP | 35% |
| 778 | s33 | REF | 30% |
| 779 | s33 | REF | 30% |
| 780 | s33 | REF | 40% |
| 781 | s33 | SNP | 35% |
| 782 | s33 | SNP | 35% |
| 783 | s33 | REF | 40% |
| 784 | s35 | SNP | 60% |
| 785 | s35 | SNP | 55% |
| 786 | s35 | SNP | 60% |
| 787 | s35 | SNP | 65% |
| 788 | s35 | SNP | 60% |
| 789 | s35 | SNP | 55% |
| 790 | s35 | SNP | 60% |
| 791 | s35 | SNP | 60% |
| 792 | s35 | SNP | 60% |
| 793 | s36 | REF | 35% |
| 794 | s36 | SNP | 40% |
| 795 | s36 | SNP | 55% |
| 796 | s36 | REF | 50% |
| 797 | s36 | REF | 50% |
| 798 | s36 | SNP | 55% |
| 799 | s36 | SNP | 55% |
| 800 | s36 | REF | 50% |
| 801 | s36 | SNP | 55% |
| 802 | s36 | REF | 50% |
| 803 | s37 | REF | 55% |
| 804 | s37 | SNP | 55% |
| 805 | s37 | REF | 50% |
| 806 | s37 | SNP | 50% |
| 807 | s37 | REF | 55% |
| 808 | s37 | SNP | 55% |
| 809 | s37 | SNP | 50% |
| 810 | s37 | REF | 50% |
| 811 | s37 | SNP | 50% |
| 812 | s37 | REF | 50% |
| 813 | s37 | SNP | 50% |
| 814 | s37 | REF | 55% |
| 815 | s37 | REF | 50% |
| 816 | s37 | SNP | 55% |
| 817 | s37 | SNP | 55% |
| 818 | s37 | REF | 55% |
| 819 | s37 | REF | 50% |
| 820 | s37 | SNP | 50% |
| 821 | s37 | REF | 50% |
| 822 | s37 | SNP | 50% |
| 823 | s37 | REF | 55% |
| 824 | s37 | SNP | 55% |
| 825 | s37 | REF | 60% |
| 826 | s37 | REF | 45% |
| 827 | s37 | SNP | 45% |
| 828 | s37 | SNP | 60% |
| 829 | s38 | REF | 65% |
| 830 | s38 | SNP | 60% |
| 831 | s38 | REF | 70% |
| 832 | s38 | SNP | 65% |
| 833 | s38 | SNP | 65% |
| 834 | s38 | REF | 70% |
| 835 | s38 | REF | 70% |
| 836 | s38 | SNP | 65% |
| 837 | s38 | SNP | 60% |
| 838 | s38 | REF | 65% |
| 839 | s1 | REF, SNP | 40% |
| 840 | s1 | REF, SNP | 40% |
| 841 | s1 | REF, SNP | 45% |
| 842 | s1 | REF, SNP | 45% |
| 843 | s1 | REF, SNP | 55% |
| 844 | s1 | REF, SNP | 55% |
| 845 | s1 | REF, SNP | 50% |
| 846 | s1 | REF, SNP | 55% |
| 847 | s1 | REF, SNP | 50% |
| 848 | s1 | REF, SNP | 50% |
| 849 | s1 | REF, SNP | 50% |
| 850 | s1 | REF, SNP | 50% |
| 851 | s2 | REF, SNP | 60% |
| 852 | s2 | REF, SNP | 60% |
| 853 | s2 | REF, SNP | 60% |
| 854 | s2, s3 | REF, REF, SNP | 60% |
| 855 | s2, s3 | REF, REF, SNP | 65% |
| 856 | s2, s3 | REF, REF, SNP | 65% |
| 857 | s2, s3 | REF, REF, SNP | 70% |
| 858 | s2, s3 | REF, REF, SNP | 50% |
| 859 | s2, s3 | REF, REF, SNP | 50% |
| 860 | s2, s3 | REF, REF | 50% |
| 861 | s2, s3 | REF, REF | 55% |
| 862 | s2, s3 | REF, REF | 55% |
| 863 | s2, s3 | REF, REF | 55% |
| 864 | s2, s3 | REF, REF | 55% |
| 865 | s2, s3 | REF, REF | 55% |
| 866 | s2, s3 | REF, REF | 50% |
| 867 | s4 | REF, SNP | 60% |
| 868 | s4 | REF, SNP | 60% |
| 869 | s4 | REF, SNP | 60% |
| 870 | s4 | REF, SNP | 60% |
| 871 | s5 | REF, SNP | 45% |
| 872 | s5 | REF, SNP | 60% |
| 873 | s5 | REF, SNP | 45% |
| 874 | s5 | REF, SNP | 60% |
| 875 | s5 | REF, SNP | 45% |
| 876 | s5 | REF, SNP | 60% |
| 877 | s6 | REF, SNP | 55% |
| 878 | s6 | REF, SNP | 55% |
| 879 | s7 | REF, SNP | 55% |
| 880 | s7 | REF, SNP | 65% |
| 881 | s7 | REF, SNP | 60% |
| 882 | s7 | REF, SNP | 70% |
| 883 | s8 | REF, SNP | 65% |
| 884 | s8 | REF, SNP | 65% |
| 885 | s8 | REF, SNP | 60% |
| 886 | s8 | REF, SNP | 65% |
| 887 | s8 | REF, SNP | 70% |
| 888 | s8 | REF, SNP | 60% |
| 889 | s9 | REF, SNP | 55% |
| 890 | s9 | REF, SNP | 40% |
| 891 | s9 | REF, SNP | 55% |
| 892 | s9 | REF, SNP | 40% |
| 893 | s9 | REF, SNP | 45% |
| 894 | s10 | REF, SNP | 55% |
| 895 | s10 | REF, SNP | 55% |
| 896 | s10 | REF, SNP | 60% |
| 897 | s10 | REF, SNP | 55% |
| 898 | s10 | REF, SNP | 55% |
| 899 | s10 | REF, SNP | 60% |
| 900 | s11 | REF, SNP | 70% |
| 901 | s11 | REF, SNP | 65% |
| 902 | s11 | REF, SNP | 75% |
| 903 | s11 | REF, SNP | 70% |
| 904 | s11 | REF, SNP | 65% |
| 905 | s11 | REF, SNP | 65% |
| 906 | s12 | REF, SNP | 70% |
| 907 | s12 | REF, SNP | 60% |
| 908 | s12 | REF, SNP | 75% |
| 909 | s12 | REF, SNP | 75% |
| 910 | s12 | REF, SNP | 65% |
| 911 | s12 | REF, SNP | 55% |
| 912 | s3 | REF, SNP | 75% |
| 913 | s3 | REF, SNP | 70% |
| 914 | s13 | REF, SNP | 60% |
| 915 | s13 | REF, SNP | 65% |
| 916 | s13, s14 | REF, REF, SNP | 65% |
| 917 | s13, s14 | REF, REF, SNP | 60% |
| 918 | s13, s14 | REF, REF, SNP | 65% |
| 919 | s13, s14 | REF, REF, SNP | 60% |
| 920 | s13, s14 | REF, REF, SNP | 65% |
| 921 | s13, s14 | REF, REF, SNP | 60% |
| 922 | s13, s14 | REF, REF, SNP | 70% |
| 923 | s13, s14 | REF, REF | 60% |
| 924 | s13, s14 | REF, REF | 65% |
| 925 | s13, s14 | REF, REF | 65% |
| 926 | s13, s14 | REF, REF | 65% |
| 927 | s13, s14 | REF, REF | 65% |
| 928 | s13, s14 | REF, REF | 60% |
| 929 | s13, s14 | REF, REF | 55% |
| 930 | s15 | REF, SNP | 55% |
| 931 | s15 | REF, SNP | 50% |
| 932 | s15 | REF, SNP | 55% |
| 933 | s15 | REF, SNP | 55% |
| 934 | s15 | REF, SNP | 55% |
| 935 | s15 | REF, SNP | 55% |
| 936 | s16 | REF, SNP | 60% |
| 937 | s16 | REF, SNP | 60% |
| 938 | s16 | REF, SNP | 60% |
| 939 | s16 | REF, SNP | 60% |
| 940 | s16 | REF, SNP | 55% |
| 941 | s16 | REF, SNP | 60% |
| 942 | s16 | REF, SNP | 65% |
| 943 | s16 | REF, SNP | 60% |
| 944 | s17 | REF, SNP | 40% |
| 945 | s17 | REF, SNP | 40% |
| 946 | s17, s18 | REF, REF, SNP | 50% |
| 947 | s17, s18 | REF, REF, SNP | 50% |
| 948 | s17, s18 | REF, REF, SNP | 50% |
| 949 | s17, s18 | REF, REF, SNP | 55% |
| 950 | s17, s18 | REF, REF, SNP | 40% |
| 951 | s17, s18 | REF, REF, SNP | 45% |
| 952 | s17, s18 | REF, REF, SNP | 45% |
| 953 | s17, s18 | REF, REF, SNP | 40% |
| 954 | s17, s18 | REF, REF | 40% |
| 955 | s17, s18 | REF, REF | 45% |
| 956 | s17, s18 | REF, REF | 45% |
| 957 | s17, s18 | REF, REF | 45% |
| 958 | s17, s18 | REF, REF | 45% |
| 959 | s17, s18 | REF, REF | 50% |
| 960 | s17, s18 | REF, REF | 50% |
| 961 | s17, s18 | REF, REF | 45% |
| 962 | s17, s18 | REF, REF | 50% |
| 963 | s17, s18 | REF, REF | 50% |
| 964 | s17, s18 | REF, REF | 50% |
| 965 | s17, s18 | REF, REF | 50% |
| 966 | s17, s18 | REF, REF | 55% |
| 967 | s17, s18 | REF, REF | 55% |
| 968 | s17, s18 | REF, REF | 50% |
| 969 | s17, s18 | REF, REF | 40% |
| 970 | s17, s18 | REF, REF | 45% |
| 971 | s17, s18 | REF, REF | 45% |
| 972 | s19 | REF, SNP | 65% |
| 973 | s19 | REF, SNP | 65% |
| 974 | s19 | REF, SNP | 70% |
| 975 | s19 | REF, SNP | 65% |
| 976 | s19 | REF, SNP | 60% |
| 977 | s19 | REF, SNP | 60% |
| 978 | s20 | REF, SNP | 90% |
| 979 | s20 | REF, SNP | 60% |
| 980 | s20 | REF, SNP | 90% |
| 981 | s20 | REF, SNP | 95% |
| 982 | s20 | REF, SNP | 55% |
| 983 | s20 | REF, SNP | 85% |
| 984 | s21 | REF, SNP | 60% |
| 985 | s21 | REF, SNP | 55% |
| 986 | s21 | REF, SNP | 65% |
| 987 | s21 | REF, SNP | 65% |
| 988 | s21 | REF, SNP | 70% |
| 989 | s22 | REF, SNP | 50% |
| 990 | s22 | REF, SNP | 55% |
| 991 | s22 | REF, SNP | 55% |
| 992 | s22 | REF, SNP | 55% |
| 993 | s22 | REF, SNP | 60% |
| 994 | s23 | REF, SNP | 65% |
| 995 | s23 | REF, SNP | 60% |
| 996 | s23 | REF, SNP | 65% |
| 997 | s23 | REF, SNP | 65% |
| 998 | s23 | REF, SNP | 55% |
| 999 | s24 | REF, SNP | 50% |
| 1000 | s24 | REF, SNP | 30% |
| 1001 | s24 | REF, SNP | 35% |
| 1002 | s24 | REF, SNP | 30% |
| 1003 | s24 | REF, SNP | 55% |
| 1004 | s24 | REF, SNP | 35% |
| 1005 | s24 | REF, SNP | 50% |
| 1006 | s14 | REF, SNP | 55% |
| 1007 | s14 | REF, SNP | 55% |
| 1008 | s14 | REF, SNP | 50% |
| 1009 | s25 | REF, SNP | 70% |
| 1010 | s25 | REF, SNP | 55% |
| 1011 | s25 | REF, SNP | 75% |
| 1012 | s25 | REF, SNP | 55% |
| 1013 | s25 | REF, SNP | 75% |
| 1014 | s25 | REF, SNP | 55% |
| 1015 | s26 | REF, SNP | 50% |
| 1016 | s26 | REF, SNP | 55% |
| 1017 | s26 | REF, SNP | 60% |
| 1018 | s26 | REF, SNP | 55% |
| 1019 | s27 | REF, SNP | 35% |
| 1020 | s27 | REF, SNP | 40% |
| 1021 | s27 | REF, SNP | 50% |
| 1022 | s27 | REF, SNP | 35% |
| 1023 | s27 | REF, SNP | 45% |
| 1024 | s18 | REF, SNP | 55% |
| 1025 | s18 | REF, SNP | 55% |
| 1026 | s28 | REF, SNP | 60% |
| 1027 | s28 | REF, SNP | 30% |
| 1028 | s28 | REF, SNP | 35% |
| 1029 | s28 | REF, SNP | 35% |
| 1030 | s29 | REF, SNP | 40% |
| 1031 | s29 | REF, SNP | 45% |
| 1032 | s29 | REF, SNP | 40% |
| 1033 | s29 | REF, SNP | 35% |
| 1034 | s29 | REF, SNP | 40% |
| 1035 | s30 | REF, SNP | 30% |
| 1036 | s30 | REF, SNP | 40% |
| 1037 | s30 | REF, SNP | 30% |
| 1038 | s30 | REF, SNP | 50% |
| 1039 | s30 | REF, SNP | 45% |
| 1040 | s30 | REF, SNP | 30% |
| 1041 | s31 | REF, SNP | 65% |
| 1042 | s31 | REF, SNP | 70% |
| 1043 | s31 | REF, SNP | 60% |
| 1044 | s31 | REF, SNP | 70% |
| 1045 | s31 | REF, SNP | 65% |
| 1046 | s31 | REF, SNP | 70% |
| 1047 | s32 | REF, SNP | 55% |
| 1048 | s32 | REF, SNP | 55% |
| 1049 | s32 | REF, SNP | 55% |
| 1050 | s32 | REF, SNP | 65% |
| 1051 | s32 | REF, SNP | 55% |
| 1052 | s33 | REF, SNP | 35% |
| 1053 | s33 | REF, SNP | 40% |
| 1054 | s33 | REF, SNP | 40% |
| 1055 | s33 | REF, SNP | 40% |
| 1056 | s33 | REF, SNP | 45% |
| 1057 | s33 | REF, SNP | 50% |
| 1058 | s33 | REF, SNP | 35% |
| 1059 | s34 | REF, SNP | 35% |
| 1060 | s34 | REF, SNP | 40% |
| 1061 | s34 | REF, SNP | 35% |
| 1062 | s34 | REF, SNP | 45% |
| 1063 | s34 | REF, SNP | 40% |
| 1064 | s34 | REF, SNP | 40% |
| 1065 | s34 | REF, SNP | 45% |
| 1066 | s34 | REF, SNP | 45% |
| 1067 | s34 | REF, SNP | 45% |
| 1068 | s34 | REF, SNP | 40% |
| 1069 | s34 | REF, SNP | 40% |
| 1070 | s34 | REF, SNP | 40% |
| 1071 | s34 | REF, SNP | 40% |
| 1072 | s34 | REF, SNP | 40% |
| 1073 | s34 | REF, SNP | 45% |
| 1074 | s34 | REF, SNP | 40% |
| 1075 | s34 | REF, SNP | 35% |
| 1076 | s34 | REF, SNP | 40% |
| 1077 | s34 | REF, SNP | 35% |
| 1078 | s34 | REF, SNP | 40% |
| 1079 | s34 | REF, SNP | 40% |
| 1080 | s34 | REF, SNP | 40% |
| 1081 | s35, s1 | REF, REF, SNP | 60% |
| 1082 | s35, s1 | REF, REF, SNP | 60% |
| 1083 | s35, s1 | REF, REF, SNP | 65% |
| 1084 | s35, s1 | REF, REF, SNP | 50% |
| 1085 | s35, s1 | REF, REF, SNP | 60% |
| 1086 | s35, s1 | REF, REF, SNP | 65% |
| 1087 | s35, s1 | REF, REF, SNP | 70% |
| 1088 | s35, s1 | REF, REF, SNP | 60% |
| 1089 | s35, s1 | REF, REF, SNP | 55% |
| 1090 | s35, s1 | REF, REF, SNP | 65% |
| 1091 | s35, s1 | REF, REF, SNP | 60% |
| 1092 | s35, s1 | REF, REF, SNP | 70% |
| 1093 | s35, s1 | REF, REF, SNP | 70% |
| 1094 | s35, s1 | REF, REF, SNP | 60% |
| 1095 | s35, s1 | REF, REF, SNP | 65% |
| 1096 | s35, s1 | REF, REF, SNP | 60% |
| 1097 | s35, s1 | REF, REF, SNP | 65% |
| 1098 | s35, s1 | REF, REF, SNP | 65% |
| 1099 | s35, s1 | REF, REF, SNP | 60% |
| 1100 | s35, s1 | REF, REF, SNP | 55% |
| 1101 | s35, s1 | REF, REF, SNP | 50% |
| 1102 | s35, s1 | REF, REF, SNP, SNP | 55% |
| 1103 | s35, s1 | REF, REF, SNP, SNP | 50% |
| 1104 | s35, s1 | REF, REF, SNP, SNP | 50% |
| 1105 | s35, s1 | REF, REF, SNP, SNP | 45% |
| 1106 | s35 | REF, SNP | 70% |
| 1107 | s35 | REF, SNP | 70% |
| 1108 | s35 | REF, SNP | 65% |
| 1109 | s36 | REF, SNP | 65% |
| 1110 | s36 | REF, SNP | 35% |
| 1111 | s36 | REF, SNP | 35% |
| 1112 | s36 | REF, SNP | 40% |
| 1113 | s36 | REF, SNP | 65% |
| 1114 | s37 | REF, SNP | 45% |
| 1115 | s37 | REF, SNP | 60% |
| 1116 | s37 | REF, SNP | 60% |
| 1117 | s37 | REF, SNP | 55% |
| 1118 | s37 | REF, SNP | 55% |
| 1119 | s38 | REF, SNP | 60% |
| 1120 | s38 | REF, SNP | 65% |
| 1121 | s38 | REF, SNP | 65% |
| 1122 | s38 | REF, SNP | 65% |
| 1123 | s38 | REF, SNP | 65% |
| 1124 | s2 | SNP | 55% |
| 1125 | s2 | SNP | 55% |
| 1126 | s2 | SNP | 55% |
| 1127 | s2 | REF | 50% |
| 1128 | s2 | REF | 50% |
| 1129 | s2 | SNP | 55% |
| 1130 | s2 | SNP | 55% |
| 1131 | s2 | SNP | 60% |
| 1132 | s2 | REF | 55% |
| 1133 | s2 | SNP | 55% |
| 1134 | s2 | SNP | 60% |
| 1135 | s2 | REF | 50% |
| 1136 | s2 | SNP | 60% |
| 1137 | s2 | SNP | 60% |
| 1138 | s2 | SNP | 60% |
| 1139 | s2 | SNP | 60% |
| 1140 | s2 | SNP | 65% |
| 1141 | s2 | REF | 60% |
| 1142 | s2 | SNP | 60% |
| 1143 | s2 | REF | 55% |
| 1144 | s2 | SNP | 55% |
| 1145 | s2 | REF | 50% |
| 1146 | s2 | SNP | 60% |
| 1147 | s2 | REF | 55% |
| 1148 | s2 | SNP | 60% |
| 1149 | s2 | REF | 50% |
| 1150 | s2 | SNP | 55% |
| 1151 | s2 | SNP | 55% |
| 1152 | s2 | REF | 50% |
| 1153 | s2 | SNP | 55% |
| 1154 | s2 | REF | 50% |
| 1155 | s2 | SNP | 55% |
| 1156 | s2 | REF | 55% |
| 1157 | s4 | SNP | 65% |
| 1158 | s4 | REF | 60% |
| 1159 | s4 | REF | 60% |
| 1160 | s4 | SNP | 70% |
| 1161 | s4 | SNP | 65% |
| 1162 | s4 | REF | 60% |
| 1163 | s4 | SNP | 65% |
| 1164 | s4 | SNP | 70% |
| 1165 | s4 | SNP | 65% |
| 1166 | s4 | SNP | 65% |
| 1167 | s4 | SNP | 60% |
| 1168 | s4 | SNP | 65% |
| 1169 | s4 | REF | 60% |
| 1170 | s4 | SNP | 65% |
| 1171 | s4 | REF | 60% |
| 1172 | s4 | SNP | 70% |
| 1173 | s4 | SNP | 70% |
| 1174 | s4 | REF | 60% |
| 1175 | s4 | SNP | 75% |
| 1176 | s4 | REF | 65% |
| 1177 | s4 | SNP | 70% |
| 1178 | s4 | SNP | 70% |
| 1179 | s4 | SNP | 65% |
| 1180 | s4 | REF | 65% |
| 1181 | s4 | SNP | 70% |
| 1182 | s4 | SNP | 65% |
| 1183 | s4 | SNP | 70% |
| 1184 | s4 | SNP | 60% |
| 1185 | s4 | SNP | 70% |
| 1186 | s4 | REF | 55% |
| 1187 | s4 | REF | 55% |
| 1188 | s4 | SNP | 60% |
| 1189 | s4 | SNP | 70% |
| 1190 | s4 | SNP | 65% |
| 1191 | s4 | SNP | 70% |
| 1192 | s5 | SNP | 40% |
| 1193 | s5 | SNP | 45% |
| 1194 | s5 | REF | 45% |
| 1195 | s5 | REF | 60% |
| 1196 | s5 | SNP | 60% |
| 1197 | s5 | SNP | 55% |
| 1198 | s5 | REF | 55% |
| 1199 | s5 | REF | 45% |
| 1200 | s5 | SNP | 45% |
| 1201 | s5 | REF | 50% |
| 1202 | s5 | SNP | 50% |
| 1203 | s5 | REF | 40% |
| 1204 | s5 | SNP | 40% |
| 1205 | s5 | REF | 60% |
| 1206 | s5 | SNP | 60% |
| 1207 | s5 | SNP | 55% |
| 1208 | s5 | REF | 55% |
| 1209 | s5 | SNP | 60% |
| 1210 | s5 | REF | 60% |
| 1211 | s5 | SNP | 65% |
| 1212 | s5 | REF | 65% |
| 1213 | s5 | SNP | 60% |
| 1214 | s5 | REF | 60% |
| 1215 | s5 | SNP | 55% |
| 1216 | s5 | REF | 55% |
| 1217 | s5 | SNP | 50% |
| 1218 | s5 | REF | 50% |
| 1219 | s5 | SNP | 50% |
| 1220 | s5 | REF | 50% |
| 1221 | s5 | REF | 50% |
| 1222 | s5 | SNP | 50% |
| 1223 | s5 | REF | 60% |
| 1224 | s5 | SNP | 60% |
| 1225 | s5 | REF | 45% |
| 1226 | s5 | SNP | 45% |
| 1227 | s5 | REF | 60% |
| 1228 | s5 | SNP | 60% |
| 1229 | s5 | SNP | 60% |
| 1230 | s5 | REF | 60% |
| 1231 | s5 | SNP | 60% |
| 1232 | s5 | REF | 60% |
| 1233 | s5 | REF | 40% |
| 1234 | s5 | SNP | 50% |
| 1235 | s5 | REF | 50% |
| 1236 | s5 | REF | 50% |
| 1237 | s5 | SNP | 50% |
| 1238 | s5 | SNP | 55% |
| 1239 | s5 | REF | 55% |
| 1240 | s5 | SNP | 45% |
| 1241 | s5 | REF | 45% |
| 1242 | s6 | SNP | 55% |
| 1243 | s6 | SNP | 50% |
| 1244 | s6 | SNP | 50% |
| 1245 | s6 | SNP | 55% |
| 1246 | s6 | SNP | 50% |
| 1247 | s6 | SNP | 60% |
| 1248 | s6 | REF | 65% |
| 1249 | s6 | REF | 60% |
| 1250 | s6 | SNP | 55% |
| 1251 | s6 | SNP | 55% |
| 1252 | s6 | SNP | 55% |
| 1253 | s6 | REF | 65% |
| 1254 | s6 | REF | 60% |
| 1255 | s6 | SNP | 60% |
| 1256 | s6 | SNP | 55% |
| 1257 | s6 | SNP | 60% |
| 1258 | s6 | SNP | 55% |
| 1259 | s6 | SNP | 55% |
| 1260 | s6 | SNP | 50% |
| 1261 | s7 | SNP | 80% |
| 1262 | s7 | REF | 75% |
| 1263 | s7 | REF | 70% |
| 1264 | s7 | REF | 70% |
| 1265 | s7 | SNP | 75% |
| 1266 | s7 | REF | 70% |
| 1267 | s7 | SNP | 75% |
| 1268 | s7 | SNP | 75% |
| 1269 | s7 | REF | 70% |
| 1270 | s7 | SNP | 75% |
| 1271 | s7 | REF | 70% |
| 1272 | s7 | SNP | 75% |
| 1273 | s7 | SNP | 65% |
| 1274 | s7 | REF | 70% |
| 1275 | s7 | SNP | 75% |
| 1276 | s7 | REF | 70% |
| 1277 | s7 | REF | 70% |
| 1278 | s7 | SNP | 75% |
| 1279 | s7 | SNP | 70% |
| 1280 | s7 | REF | 65% |
| 1281 | s7 | SNP | 80% |
| 1282 | s7 | REF | 75% |
| 1283 | s7 | REF | 70% |
| 1284 | s7 | SNP | 75% |
| 1285 | s7 | REF | 70% |
| 1286 | s7 | SNP | 75% |
| 1287 | s7 | REF | 70% |
| 1288 | s7 | SNP | 75% |
| 1289 | s7 | SNP | 70% |
| 1290 | s7 | SNP | 75% |
| 1291 | s7 | SNP | 80% |
| 1292 | s7 | REF | 75% |
| 1293 | s7 | REF | 75% |
| 1294 | s7 | SNP | 80% |
| 1295 | s7 | SNP | 75% |
| 1296 | s7 | REF | 70% |
| 1297 | s7 | SNP | 80% |
| 1298 | s7 | REF | 75% |
| 1299 | s7 | REF | 75% |
| 1300 | s7 | SNP | 80% |
| 1301 | s7 | REF | 75% |
| 1302 | s7 | SNP | 80% |
| 1303 | s7 | SNP | 75% |
| 1304 | s7 | REF | 70% |
| 1305 | s7 | REF | 65% |
| 1306 | s7 | REF | 70% |
| 1307 | s7 | SNP | 75% |
| 1308 | s7 | SNP | 75% |
| 1309 | s7 | REF | 70% |
| 1310 | s7 | SNP | 75% |
| 1311 | s7 | REF | 70% |
| 1312 | s7 | REF | 60% |
| 1313 | s7 | REF | 70% |
| 1314 | s7 | SNP | 75% |
| 1315 | s7 | REF | 75% |
| 1316 | s7 | SNP | 80% |
| 1317 | s7 | SNP | 70% |
| 1318 | s7 | REF | 65% |
| 1319 | s8 | REF | 50% |
| 1320 | s8 | REF | 60% |
| 1321 | s8 | SNP | 65% |
| 1322 | s8 | SNP | 60% |
| 1323 | s8 | REF | 55% |
| 1324 | s8 | SNP | 50% |
| 1325 | s8 | REF | 45% |
| 1326 | s8 | REF | 55% |
| 1327 | s8 | SNP | 60% |
| 1328 | s8 | REF | 60% |
| 1329 | s8 | SNP | 65% |
| 1330 | s8 | REF | 50% |
| 1331 | s8 | SNP | 55% |
| 1332 | s8 | REF | 60% |
| 1333 | s8 | SNP | 65% |
| 1334 | s8 | SNP | 65% |
| 1335 | s8 | REF | 60% |
| 1336 | s8 | REF | 50% |
| 1337 | s8 | REF | 60% |
| 1338 | s8 | SNP | 65% |
| 1339 | s8 | REF | 60% |
| 1340 | s8 | SNP | 65% |
| 1341 | s8 | SNP | 65% |
| 1342 | s8 | REF | 60% |
| 1343 | s8 | SNP | 55% |
| 1344 | s8 | REF | 50% |
| 1345 | s8 | REF | 65% |
| 1346 | s8 | SNP | 70% |
| 1347 | s8 | REF | 50% |
| 1348 | s8 | SNP | 55% |
| 1349 | s8 | SNP | 55% |
| 1350 | s8 | REF | 50% |
| 1351 | s8 | SNP | 55% |
| 1352 | s8 | REF | 60% |
| 1353 | s8 | SNP | 65% |
| 1354 | s8 | SNP | 55% |
| 1355 | s8 | REF | 50% |
| 1356 | s8 | SNP | 55% |
| 1357 | s8 | REF | 55% |
| 1358 | s8 | SNP | 60% |
| 1359 | s8 | REF | 65% |
| 1360 | s8 | SNP | 70% |
| 1361 | s8 | SNP | 70% |
| 1362 | s8 | REF | 65% |
| 1363 | s8 | REF | 55% |
| 1364 | s8 | SNP | 60% |
| 1365 | s8 | SNP | 60% |
| 1366 | s8 | REF | 55% |
| 1367 | s8 | SNP | 60% |
| 1368 | s8 | REF | 55% |
| 1369 | s8 | REF | 45% |
| 1370 | s8 | REF | 60% |
| 1371 | s8 | SNP | 65% |
| 1372 | s8 | SNP | 50% |
| 1373 | s8 | SNP | 65% |
| 1374 | s8 | SNP | 65% |
| 1375 | s8 | REF | 60% |
| 1376 | s8 | SNP | 55% |
| 1377 | s8 | REF | 50% |
| 1378 | s8 | REF | 60% |
| 1379 | s9 | REF | 45% |
| 1380 | s9 | SNP | 50% |
| 1381 | s9 | SNP | 50% |
| 1382 | s9 | REF | 45% |
| 1383 | s9 | REF | 45% |
| 1384 | s9 | SNP | 50% |
| 1385 | s9 | REF | 50% |
| 1386 | s9 | SNP | 55% |
| 1387 | s9 | REF | 45% |
| 1388 | s9 | SNP | 50% |
| 1389 | s9 | REF | 45% |
| 1390 | s9 | REF | 45% |
| 1391 | s9 | SNP | 50% |
| 1392 | s9 | REF | 45% |
| 1393 | s9 | SNP | 65% |
| 1394 | s9 | REF | 60% |
| 1395 | s9 | SNP | 65% |
| 1396 | s9 | SNP | 50% |
| 1397 | s9 | REF | 45% |
| 1398 | s9 | SNP | 50% |
| 1399 | s9 | SNP | 65% |
| 1400 | s9 | SNP | 60% |
| 1401 | s9 | REF | 55% |
| 1402 | s9 | SNP | 55% |
| 1403 | s9 | REF | 50% |
| 1404 | s9 | REF | 60% |
| 1405 | s9 | SNP | 45% |
| 1406 | s9 | REF | 40% |
| 1407 | s9 | REF | 45% |
| 1408 | s9 | SNP | 50% |
| 1409 | s9 | REF | 50% |
| 1410 | s9 | SNP | 55% |
| 1411 | s9 | REF | 50% |
| 1412 | s9 | SNP | 55% |
| 1413 | s9 | SNP | 50% |
| 1414 | s9 | REF | 55% |
| 1415 | s9 | SNP | 60% |
| 1416 | s9 | SNP | 45% |
| 1417 | s9 | REF | 40% |
| 1418 | s9 | SNP | 60% |
| 1419 | s9 | REF | 55% |
| 1420 | s9 | SNP | 55% |
| 1421 | s9 | REF | 50% |
| 1422 | s9 | SNP | 55% |
| 1423 | s9 | REF | 50% |
| 1424 | s9 | SNP | 50% |
| 1425 | s9 | REF | 45% |
| 1426 | s9 | SNP | 55% |
| 1427 | s9 | REF | 50% |
| 1428 | s9 | REF | 55% |
| 1429 | s9 | SNP | 60% |
| 1430 | s9 | REF | 60% |
| 1431 | s9 | SNP | 45% |
| 1432 | s9 | REF | 40% |
| 1433 | s10 | SNP | 55% |
| 1434 | s10 | REF | 60% |
| 1435 | s10 | SNP | 60% |
| 1436 | s10 | SNP | 55% |
| 1437 | s10 | REF | 60% |
| 1438 | s10 | SNP | 55% |
| 1439 | s10 | REF | 60% |
| 1440 | s10 | SNP | 55% |
| 1441 | s10 | REF | 60% |
| 1442 | s10 | REF | 60% |
| 1443 | s10 | SNP | 55% |
| 1444 | s10 | REF | 60% |
| 1445 | s10 | SNP | 55% |
| 1446 | s10 | SNP | 60% |
| 1447 | s10 | REF | 65% |
| 1448 | s10 | SNP | 60% |
| 1449 | s10 | REF | 65% |
| 1450 | s10 | SNP | 60% |
| 1451 | s10 | REF | 65% |
| 1452 | s10 | REF | 65% |
| 1453 | s10 | REF | 70% |
| 1454 | s10 | SNP | 65% |
| 1455 | s10 | SNP | 65% |
| 1456 | s10 | REF | 70% |
| 1457 | s10 | REF | 70% |
| 1458 | s10 | SNP | 65% |
| 1459 | s10 | SNP | 65% |
| 1460 | s10 | REF | 70% |
| 1461 | s10 | SNP | 55% |
| 1462 | s10 | REF | 60% |
| 1463 | s10 | SNP | 60% |
| 1464 | s10 | REF | 65% |
| 1465 | s10 | SNP | 60% |
| 1466 | s10 | REF | 65% |
| 1467 | s10 | REF | 60% |
| 1468 | s10 | SNP | 55% |
| 1469 | s10 | SNP | 55% |
| 1470 | s10 | REF | 60% |
| 1471 | s10 | REF | 60% |
| 1472 | s10 | SNP | 55% |
| 1473 | s10 | SNP | 60% |
| 1474 | s10 | REF | 65% |
| 1475 | s10 | SNP | 55% |
| 1476 | s10 | REF | 60% |
| 1477 | s10 | REF | 60% |
| 1478 | s10 | SNP | 55% |
| 1479 | s10 | REF | 65% |
| 1480 | s10 | SNP | 60% |
| 1481 | s10 | SNP | 50% |
| 1482 | s10 | REF | 55% |
| 1483 | s10 | SNP | 50% |
| 1484 | s10 | REF | 55% |
| 1485 | s11 | SNP | 65% |
| 1486 | s11 | REF | 70% |
| 1487 | s11 | SNP | 70% |
| 1488 | s11 | REF | 75% |
| 1489 | s11 | REF | 75% |
| 1490 | s11 | SNP | 70% |
| 1491 | s11 | SNP | 75% |
| 1492 | s11 | REF | 80% |
| 1493 | s11 | SNP | 60% |
| 1494 | s11 | REF | 65% |
| 1495 | s11 | SNP | 70% |
| 1496 | s11 | REF | 75% |
| 1497 | s11 | SNP | 70% |
| 1498 | s11 | REF | 80% |
| 1499 | s11 | SNP | 75% |
| 1500 | s11 | SNP | 65% |
| 1501 | s11 | REF | 70% |
| 1502 | s11 | SNP | 70% |
| 1503 | s11 | REF | 75% |
| 1504 | s11 | SNP | 70% |
| 1505 | s11 | SNP | 70% |
| 1506 | s11 | REF | 75% |
| 1507 | s11 | SNP | 70% |
| 1508 | s11 | REF | 75% |
| 1509 | s11 | SNP | 70% |
| 1510 | s11 | SNP | 75% |
| 1511 | s11 | REF | 80% |
| 1512 | s11 | REF | 75% |
| 1513 | s11 | REF | 75% |
| 1514 | s11 | REF | 75% |
| 1515 | s11 | REF | 75% |
| 1516 | s11 | SNP | 70% |
| 1517 | s11 | REF | 75% |
| 1518 | s11 | SNP | 75% |
| 1519 | s11 | REF | 80% |
| 1520 | s11 | REF | 80% |
| 1521 | s11 | REF | 75% |
| 1522 | s11 | SNP | 70% |
| 1523 | s11 | SNP | 75% |
| 1524 | s11 | SNP | 75% |
| 1525 | s11 | REF | 80% |
| 1526 | s11 | REF | 75% |
| 1527 | s11 | REF | 75% |
| 1528 | s11 | SNP | 70% |
| 1529 | s11 | REF | 80% |
| 1530 | s11 | SNP | 75% |
| 1531 | s11 | SNP | 75% |
| 1532 | s11 | REF | 80% |
| 1533 | s11 | REF | 80% |
| 1534 | s11 | REF | 75% |
| 1535 | s11 | SNP | 70% |
| 1536 | s11 | REF | 80% |
| 1537 | s11 | SNP | 75% |
| 1538 | s11 | SNP | 75% |
| 1539 | s11 | SNP | 70% |
| 1540 | s11 | SNP | 65% |
| 1541 | s11 | REF | 70% |
| 1542 | s11 | SNP | 70% |
| 1543 | s12 | REF | 65% |
| 1544 | s12 | SNP | 75% |
| 1545 | s12 | REF | 70% |
| 1546 | s12 | REF | 70% |
| 1547 | s12 | SNP | 75% |
| 1548 | s12 | REF | 65% |
| 1549 | s12 | SNP | 70% |
| 1550 | s12 | REF | 65% |
| 1551 | s12 | SNP | 75% |
| 1552 | s12 | REF | 70% |
| 1553 | s12 | SNP | 75% |
| 1554 | s12 | REF | 70% |
| 1555 | s12 | REF | 65% |
| 1556 | s12 | REF | 70% |
| 1557 | s12 | REF | 70% |
| 1558 | s12 | SNP | 75% |
| 1559 | s12 | SNP | 75% |
| 1560 | s12 | SNP | 70% |
| 1561 | s12 | SNP | 70% |
| 1562 | s12 | REF | 65% |
| 1563 | s12 | SNP | 70% |
| 1564 | s12 | REF | 75% |
| 1565 | s12 | SNP | 80% |
| 1566 | s12 | SNP | 75% |
| 1567 | s12 | REF | 70% |
| 1568 | s12 | SNP | 70% |
| 1569 | s12 | REF | 65% |
| 1570 | s12 | SNP | 70% |
| 1571 | s12 | SNP | 75% |
| 1572 | s12 | REF | 70% |
| 1573 | s12 | REF | 65% |
| 1574 | s12 | SNP | 70% |
| 1575 | s12 | SNP | 75% |
| 1576 | s12 | REF | 70% |
| 1577 | s12 | REF | 65% |
| 1578 | s12 | SNP | 70% |
| 1579 | s12 | SNP | 75% |
| 1580 | s12 | REF | 70% |
| 1581 | s12 | SNP | 65% |
| 1582 | s12 | REF | 60% |
| 1583 | s12 | SNP | 65% |
| 1584 | s12 | SNP | 70% |
| 1585 | s12 | REF | 65% |
| 1586 | s12 | REF | 65% |
| 1587 | s12 | SNP | 70% |
| 1588 | s12 | REF | 60% |
| 1589 | s3 | REF | 65% |
| 1590 | s3 | SNP | 70% |
| 1591 | s3 | REF | 60% |
| 1592 | s3 | SNP | 65% |
| 1593 | s3 | SNP | 65% |
| 1594 | s3 | REF | 60% |
| 1595 | s3 | SNP | 70% |
| 1596 | s3 | REF | 65% |
| 1597 | s3 | SNP | 70% |
| 1598 | s3 | REF | 65% |
| 1599 | s3 | SNP | 60% |
| 1600 | s3 | SNP | 65% |
| 1601 | s3 | SNP | 60% |
| 1602 | s3 | SNP | 70% |
| 1603 | s3 | SNP | 60% |
| 1604 | s3 | SNP | 70% |
| 1605 | s3 | SNP | 75% |
| 1606 | s3 | SNP | 60% |
| 1607 | s3 | SNP | 60% |
| 1608 | s3 | SNP | 55% |
| 1609 | s3 | SNP | 80% |
| 1610 | s3 | REF | 65% |
| 1611 | s3 | SNP | 70% |
| 1612 | s3 | REF | 65% |
| 1613 | s3 | SNP | 70% |
| 1614 | s3 | SNP | 70% |
| 1615 | s3 | REF | 65% |
| 1616 | s3 | SNP | 70% |
| 1617 | s3 | REF | 65% |
| 1618 | s3 | SNP | 70% |
| 1619 | s3 | REF | 65% |
| 1620 | s3 | REF | 75% |
| 1621 | s3 | SNP | 80% |
| 1622 | s3 | REF | 65% |
| 1623 | s3 | SNP | 70% |
| 1624 | s3 | SNP | 70% |
| 1625 | s3 | REF | 65% |
| 1626 | s3 | REF | 65% |
| 1627 | s3 | SNP | 70% |
| 1628 | s3 | SNP | 70% |
| 1629 | s3 | REF | 65% |
| 1630 | s3 | SNP | 55% |
| 1631 | s3 | SNP | 75% |
| 1632 | s3 | REF | 60% |
| 1633 | s3 | SNP | 65% |
| 1634 | s3 | SNP | 65% |
| 1635 | s3 | REF | 60% |
| 1636 | s3 | REF | 75% |
| 1637 | s3 | REF | 70% |
| 1638 | s13 | SNP | 55% |
| 1639 | s13 | SNP | 60% |
| 1640 | s13 | REF | 65% |
| 1641 | s13 | REF | 55% |
| 1642 | s13 | SNP | 50% |
| 1643 | s13 | SNP | 50% |
| 1644 | s13 | REF | 55% |
| 1645 | s13 | REF | 60% |
| 1646 | s13 | REF | 55% |
| 1647 | s13 | SNP | 50% |
| 1648 | s13 | SNP | 60% |
| 1649 | s13 | REF | 65% |
| 1650 | s13 | SNP | 60% |
| 1651 | s13 | SNP | 55% |
| 1652 | s13 | SNP | 55% |
| 1653 | s13 | SNP | 60% |
| 1654 | s13 | REF | 65% |
| 1655 | s13 | REF | 60% |
| 1656 | s13 | SNP | 55% |
| 1657 | s13 | SNP | 65% |
| 1658 | s13 | SNP | 60% |
| 1659 | s13 | SNP | 65% |
| 1660 | s13 | REF | 70% |
| 1661 | s13 | REF | 70% |
| 1662 | s13 | SNP | 65% |
| 1663 | s13 | SNP | 60% |
| 1664 | s13 | SNP | 60% |
| 1665 | s13 | REF | 65% |
| 1666 | s13 | SNP | 60% |
| 1667 | s13 | SNP | 60% |
| 1668 | s13 | REF | 65% |
| 1669 | s13 | SNP | 60% |
| 1670 | s13 | SNP | 50% |
| 1671 | s13 | REF | 55% |
| 1672 | s13 | REF | 65% |
| 1673 | s13 | SNP | 60% |
| 1674 | s13 | SNP | 60% |
| 1675 | s13 | REF | 65% |
| 1676 | s13 | SNP | 55% |
| 1677 | s13 | REF | 65% |
| 1678 | s13 | SNP | 60% |
| 1679 | s13 | SNP | 45% |
| 1680 | s13 | REF | 50% |
| 1681 | s13 | SNP | 50% |
| 1682 | s13 | REF | 60% |
| 1683 | s13 | SNP | 55% |
| 1684 | s15 | SNP | 50% |
| 1685 | s15 | SNP | 45% |
| 1686 | s15 | REF | 50% |
| 1687 | s15 | REF | 55% |
| 1688 | s15 | SNP | 50% |
| 1689 | s15 | REF | 50% |
| 1690 | s15 | SNP | 45% |
| 1691 | s15 | REF | 55% |
| 1692 | s15 | SNP | 50% |
| 1693 | s15 | REF | 50% |
| 1694 | s15 | REF | 55% |
| 1695 | s15 | SNP | 50% |
| 1696 | s15 | REF | 55% |
| 1697 | s15 | SNP | 50% |
| 1698 | s15 | REF | 55% |
| 1699 | s15 | SNP | 50% |
| 1700 | s15 | REF | 55% |
| 1701 | s15 | SNP | 50% |
| 1702 | s15 | SNP | 50% |
| 1703 | s15 | REF | 55% |
| 1704 | s15 | SNP | 50% |
| 1705 | s15 | SNP | 45% |
| 1706 | s15 | REF | 50% |
| 1707 | s15 | REF | 55% |
| 1708 | s15 | REF | 55% |
| 1709 | s15 | REF | 60% |
| 1710 | s15 | SNP | 55% |
| 1711 | s15 | SNP | 50% |
| 1712 | s15 | REF | 55% |
| 1713 | s15 | REF | 55% |
| 1714 | s15 | SNP | 50% |
| 1715 | s15 | SNP | 50% |
| 1716 | s15 | SNP | 45% |
| 1717 | s15 | REF | 50% |
| 1718 | s15 | SNP | 45% |
| 1719 | s15 | REF | 50% |
| 1720 | s15 | REF | 55% |
| 1721 | s15 | SNP | 50% |
| 1722 | s15 | SNP | 45% |
| 1723 | s15 | REF | 50% |
| 1724 | s15 | REF | 50% |
| 1725 | s15 | SNP | 45% |
| 1726 | s15 | SNP | 45% |
| 1727 | s15 | REF | 50% |
| 1728 | s15 | REF | 55% |
| 1729 | s15 | SNP | 50% |
| 1730 | s15 | REF | 55% |
| 1731 | s15 | SNP | 50% |
| 1732 | s15 | REF | 55% |
| 1733 | s15 | REF | 55% |
| 1734 | s15 | SNP | 50% |
| 1735 | s15 | SNP | 45% |
| 1736 | s15 | SNP | 45% |
| 1737 | s15 | REF | 50% |
| 1738 | s16 | REF | 55% |
| 1739 | s16 | REF | 55% |
| 1740 | s16 | SNP | 60% |
| 1741 | s16 | REF | 60% |
| 1742 | s16 | SNP | 55% |
| 1743 | s16 | REF | 50% |
| 1744 | s16 | SNP | 60% |
| 1745 | s16 | REF | 60% |
| 1746 | s16 | REF | 55% |
| 1747 | s16 | SNP | 60% |
| 1748 | s16 | SNP | 65% |
| 1749 | s16 | SNP | 60% |
| 1750 | s16 | REF | 55% |
| 1751 | s16 | SNP | 55% |
| 1752 | s16 | REF | 50% |
| 1753 | s16 | REF | 55% |
| 1754 | s16 | SNP | 60% |
| 1755 | s16 | SNP | 60% |
| 1756 | s16 | REF | 55% |
| 1757 | s16 | SNP | 55% |
| 1758 | s16 | SNP | 65% |
| 1759 | s16 | REF | 60% |
| 1760 | s16 | REF | 55% |
| 1761 | s16 | SNP | 60% |
| 1762 | s16 | SNP | 55% |
| 1763 | s16 | REF | 50% |
| 1764 | s16 | REF | 55% |
| 1765 | s16 | SNP | 60% |
| 1766 | s16 | SNP | 55% |
| 1767 | s16 | REF | 50% |
| 1768 | s16 | SNP | 65% |
| 1769 | s16 | SNP | 60% |
| 1770 | s16 | REF | 55% |
| 1771 | s16 | SNP | 60% |
| 1772 | s16 | REF | 55% |
| 1773 | s16 | REF | 50% |
| 1774 | s16 | SNP | 55% |
| 1775 | s16 | REF | 50% |
| 1776 | s16 | SNP | 55% |
| 1777 | s16 | SNP | 60% |
| 1778 | s16 | REF | 55% |
| 1779 | s16 | REF | 50% |
| 1780 | s16 | SNP | 55% |
| 1781 | s16 | REF | 50% |
| 1782 | s16 | SNP | 55% |
| 1783 | s16 | REF | 55% |
| 1784 | s16 | SNP | 60% |
| 1785 | s16 | SNP | 55% |
| 1786 | s16 | REF | 50% |
| 1787 | s16 | SNP | 55% |
| 1788 | s16 | REF | 50% |
| 1789 | s16 | SNP | 55% |
| 1790 | s16 | REF | 50% |
| 1791 | s16 | REF | 50% |
| 1792 | s39 | SNP | 40% |
| 1793 | s39 | SNP | 40% |
| 1794 | s39 | SNP | 40% |
| 1795 | s39 | SNP | 40% |
| 1796 | s39 | SNP | 45% |
| 1797 | s39 | SNP | 40% |
| 1798 | s39 | SNP | 40% |
| 1799 | s39 | SNP | 40% |
| 1800 | s39 | SNP | 40% |
| 1801 | s17 | SNP | 45% |
| 1802 | s17 | SNP | 45% |
| 1803 | s17 | SNP | 50% |
| 1804 | s17 | SNP | 50% |
| 1805 | s17 | SNP | 50% |
| 1806 | s17 | SNP | 45% |
| 1807 | s17 | REF | 40% |
| 1808 | s17 | SNP | 40% |
| 1809 | s17 | REF | 35% |
| 1810 | s17 | SNP | 40% |
| 1811 | s17 | SNP | 55% |
| 1812 | s17 | SNP | 40% |
| 1813 | s17 | SNP | 55% |
| 1814 | s17 | REF | 35% |
| 1815 | s17 | SNP | 50% |
| 1816 | s17 | SNP | 50% |
| 1817 | s17 | REF | 35% |
| 1818 | s17 | SNP | 50% |
| 1819 | s17 | SNP | 55% |
| 1820 | s17 | SNP | 40% |
| 1821 | s17 | REF | 35% |
| 1822 | s17 | SNP | 40% |
| 1823 | s17 | SNP | 55% |
| 1824 | s17 | REF | 35% |
| 1825 | s17 | SNP | 50% |
| 1826 | s17 | REF | 45% |
| 1827 | s17 | SNP | 45% |
| 1828 | s17 | SNP | 50% |
| 1829 | s17 | REF | 45% |
| 1830 | s17 | SNP | 55% |
| 1831 | s17 | SNP | 50% |
| 1832 | s17 | SNP | 60% |
| 1833 | s17 | SNP | 45% |
| 1834 | s17 | REF | 40% |
| 1835 | s17 | SNP | 45% |
| 1836 | s17 | SNP | 60% |
| 1837 | s17 | REF | 40% |
| 1838 | s17 | SNP | 55% |
| 1839 | s17 | SNP | 55% |
| 1840 | s17 | SNP | 45% |
| 1841 | s17 | SNP | 50% |
| 1842 | s17 | REF | 35% |
| 1843 | s17 | SNP | 40% |
| 1844 | s17 | SNP | 45% |
| 1845 | s17 | REF | 40% |
| 1846 | s17 | REF | 40% |
| 1847 | s17 | SNP | 45% |
| 1848 | s17 | SNP | 50% |
| 1849 | s19 | REF | 60% |
| 1850 | s19 | SNP | 55% |
| 1851 | s19 | REF | 65% |
| 1852 | s19 | SNP | 60% |
| 1853 | s19 | SNP | 60% |
| 1854 | s19 | REF | 65% |
| 1855 | s19 | SNP | 60% |
| 1856 | s19 | SNP | 55% |
| 1857 | s19 | REF | 60% |
| 1858 | s19 | REF | 60% |
| 1859 | s19 | SNP | 55% |
| 1860 | s19 | REF | 65% |
| 1861 | s19 | SNP | 60% |
| 1862 | s19 | REF | 60% |
| 1863 | s19 | SNP | 55% |
| 1864 | s19 | REF | 60% |
| 1865 | s19 | SNP | 55% |
| 1866 | s19 | SNP | 60% |
| 1867 | s19 | REF | 65% |
| 1868 | s19 | REF | 65% |
| 1869 | s19 | SNP | 60% |
| 1870 | s19 | REF | 70% |
| 1871 | s19 | SNP | 65% |
| 1872 | s19 | REF | 70% |
| 1873 | s19 | REF | 65% |
| 1874 | s19 | SNP | 60% |
| 1875 | s19 | REF | 65% |
| 1876 | s19 | SNP | 60% |
| 1877 | s19 | REF | 65% |
| 1878 | s19 | SNP | 60% |
| 1879 | s19 | REF | 65% |
| 1880 | s19 | SNP | 55% |
| 1881 | s19 | REF | 60% |
| 1882 | s19 | SNP | 65% |
| 1883 | s19 | SNP | 65% |
| 1884 | s19 | REF | 70% |
| 1885 | s19 | REF | 65% |
| 1886 | s19 | REF | 65% |
| 1887 | s19 | SNP | 60% |
| 1888 | s19 | REF | 65% |
| 1889 | s19 | SNP | 60% |
| 1890 | s19 | REF | 60% |
| 1891 | s19 | SNP | 55% |
| 1892 | s19 | SNP | 60% |
| 1893 | s20 | REF | 75% |
| 1894 | s20 | SNP | 70% |
| 1895 | s20 | SNP | 75% |
| 1896 | s20 | REF | 80% |
| 1897 | s20 | REF | 90% |
| 1898 | s20 | REF | 80% |
| 1899 | s20 | SNP | 75% |
| 1900 | s20 | SNP | 50% |
| 1901 | s20 | SNP | 85% |
| 1902 | s20 | SNP | 75% |
| 1903 | s20 | REF | 80% |
| 1904 | s20 | REF | 65% |
| 1905 | s20 | SNP | 60% |
| 1906 | s20 | SNP | 50% |
| 1907 | s20 | SNP | 75% |
| 1908 | s20 | REF | 80% |
| 1909 | s20 | SNP | 80% |
| 1910 | s20 | REF | 85% |
| 1911 | s20 | SNP | 60% |
| 1912 | s20 | SNP | 70% |
| 1913 | s20 | REF | 75% |
| 1914 | s20 | SNP | 70% |
| 1915 | s20 | REF | 75% |
| 1916 | s20 | REF | 65% |
| 1917 | s20 | SNP | 85% |
| 1918 | s20 | REF | 90% |
| 1919 | s20 | SNP | 80% |
| 1920 | s20 | REF | 85% |
| 1921 | s20 | SNP | 65% |
| 1922 | s20 | REF | 70% |
| 1923 | s20 | REF | 95% |
| 1924 | s20 | REF | 55% |
| 1925 | s20 | SNP | 80% |
| 1926 | s20 | REF | 85% |
| 1927 | s20 | SNP | 60% |
| 1928 | s20 | REF | 65% |
| 1929 | s20 | SNP | 90% |
| 1930 | s20 | REF | 95% |
| 1931 | s20 | REF | 55% |
| 1932 | s20 | REF | 85% |
| 1933 | s20 | SNP | 80% |
| 1934 | s20 | REF | 85% |
| 1935 | s20 | SNP | 80% |
| 1936 | s20 | REF | 60% |
| 1937 | s20 | SNP | 55% |
| 1938 | s20 | SNP | 90% |
| 1939 | s20 | REF | 55% |
| 1940 | s20 | SNP | 50% |
| 1941 | s21 | REF | 55% |
| 1942 | s21 | SNP | 50% |
| 1943 | s21 | SNP | 50% |
| 1944 | s21 | REF | 55% |
| 1945 | s21 | SNP | 60% |
| 1946 | s21 | REF | 65% |
| 1947 | s21 | REF | 60% |
| 1948 | s21 | SNP | 55% |
| 1949 | s21 | REF | 60% |
| 1950 | s21 | SNP | 55% |
| 1951 | s21 | SNP | 55% |
| 1952 | s21 | SNP | 55% |
| 1953 | s21 | REF | 60% |
| 1954 | s21 | REF | 60% |
| 1955 | s21 | SNP | 60% |
| 1956 | s21 | REF | 65% |
| 1957 | s21 | SNP | 60% |
| 1958 | s21 | REF | 65% |
| 1959 | s21 | SNP | 60% |
| 1960 | s21 | REF | 65% |
| 1961 | s21 | SNP | 55% |
| 1962 | s21 | REF | 60% |
| 1963 | s21 | REF | 60% |
| 1964 | s21 | SNP | 55% |
| 1965 | s21 | SNP | 50% |
| 1966 | s21 | REF | 55% |
| 1967 | s21 | SNP | 60% |
| 1968 | s21 | REF | 65% |
| 1969 | s21 | REF | 70% |
| 1970 | s21 | SNP | 65% |
| 1971 | s21 | REF | 60% |
| 1972 | s21 | SNP | 55% |
| 1973 | s21 | SNP | 60% |
| 1974 | s21 | REF | 65% |
| 1975 | s21 | REF | 60% |
| 1976 | s21 | REF | 65% |
| 1977 | s21 | SNP | 60% |
| 1978 | s21 | SNP | 55% |
| 1979 | s21 | REF | 65% |
| 1980 | s21 | SNP | 60% |
| 1981 | s21 | REF | 65% |
| 1982 | s21 | SNP | 60% |
| 1983 | s21 | SNP | 55% |
| 1984 | s21 | REF | 60% |
| 1985 | s21 | REF | 65% |
| 1986 | s21 | SNP | 60% |
| 1987 | s21 | SNP | 60% |
| 1988 | s21 | SNP | 55% |
| 1989 | s21 | REF | 60% |
| 1990 | s21 | REF | 60% |
| 1991 | s21 | SNP | 55% |
| 1992 | s21 | SNP | 55% |
| 1993 | s21 | REF | 60% |
| 1994 | s21 | REF | 65% |
| 1995 | s21 | SNP | 50% |
| 1996 | s21 | REF | 55% |
| 1997 | s22 | SNP | 40% |
| 1998 | s22 | REF | 45% |
| 1999 | s22 | SNP | 50% |
| 2000 | s22 | REF | 60% |
| 2001 | s22 | SNP | 55% |
| 2002 | s22 | REF | 65% |
| 2003 | s22 | SNP | 60% |
| 2004 | s22 | REF | 45% |
| 2005 | s22 | SNP | 40% |
| 2006 | s22 | REF | 55% |
| 2007 | s22 | SNP | 50% |
| 2008 | s22 | SNP | 55% |
| 2009 | s22 | REF | 60% |
| 2010 | s22 | SNP | 55% |
| 2011 | s22 | SNP | 55% |
| 2012 | s22 | REF | 60% |
| 2013 | s22 | SNP | 55% |
| 2014 | s22 | SNP | 55% |
| 2015 | s22 | REF | 60% |
| 2016 | s22 | REF | 65% |
| 2017 | s22 | SNP | 60% |
| 2018 | s22 | REF | 60% |
| 2019 | s22 | REF | 60% |
| 2020 | s22 | SNP | 55% |
| 2021 | s22 | REF | 60% |
| 2022 | s22 | REF | 60% |
| 2023 | s22 | SNP | 55% |
| 2024 | s22 | REF | 65% |
| 2025 | s22 | REF | 55% |
| 2026 | s22 | SNP | 50% |
| 2027 | s22 | REF | 60% |
| 2028 | s22 | SNP | 55% |
| 2029 | s22 | REF | 55% |
| 2030 | s22 | SNP | 50% |
| 2031 | s22 | REF | 55% |
| 2032 | s22 | REF | 55% |
| 2033 | s22 | SNP | 50% |
| 2034 | s22 | SNP | 60% |
| 2035 | s22 | REF | 65% |
| 2036 | s22 | REF | 70% |
| 2037 | s22 | SNP | 65% |
| 2038 | s22 | SNP | 55% |
| 2039 | s22 | REF | 60% |
| 2040 | s22 | REF | 60% |
| 2041 | s22 | SNP | 55% |
| 2042 | s22 | SNP | 65% |
| 2043 | s22 | REF | 70% |
| 2044 | s22 | SNP | 55% |
| 2045 | s22 | REF | 60% |
| 2046 | s22 | REF | 50% |
| 2047 | s22 | SNP | 45% |
| 2048 | s22 | REF | 60% |
| 2049 | s22 | REF | 60% |
| 2050 | s22 | SNP | 55% |
| 2051 | s22 | SNP | 45% |
| 2052 | s22 | REF | 50% |
| 2053 | s22 | SNP | 55% |
| 2054 | s22 | REF | 60% |
| 2055 | s22 | SNP | 60% |
| 2056 | s22 | REF | 65% |
| 2057 | s22 | SNP | 60% |
| 2058 | s22 | SNP | 55% |
| 2059 | s23 | REF | 55% |
| 2060 | s23 | SNP | 50% |
| 2061 | s23 | REF | 60% |
| 2062 | s23 | SNP | 55% |
| 2063 | s23 | SNP | 55% |
| 2064 | s23 | REF | 55% |
| 2065 | s23 | SNP | 50% |
| 2066 | s23 | REF | 55% |
| 2067 | s23 | SNP | 50% |
| 2068 | s23 | SNP | 55% |
| 2069 | s23 | REF | 60% |
| 2070 | s23 | REF | 60% |
| 2071 | s23 | SNP | 55% |
| 2072 | s23 | REF | 55% |
| 2073 | s23 | SNP | 50% |
| 2074 | s23 | SNP | 55% |
| 2075 | s23 | REF | 55% |
| 2076 | s23 | SNP | 50% |
| 2077 | s23 | REF | 55% |
| 2078 | s23 | SNP | 50% |
| 2079 | s23 | REF | 60% |
| 2080 | s23 | SNP | 55% |
| 2081 | s23 | REF | 65% |
| 2082 | s23 | REF | 60% |
| 2083 | s23 | SNP | 55% |
| 2084 | s23 | REF | 60% |
| 2085 | s23 | SNP | 60% |
| 2086 | s23 | REF | 65% |
| 2087 | s23 | REF | 65% |
| 2088 | s23 | SNP | 60% |
| 2089 | s23 | SNP | 60% |
| 2090 | s23 | REF | 65% |
| 2091 | s23 | REF | 60% |
| 2092 | s23 | REF | 70% |
| 2093 | s23 | SNP | 55% |
| 2094 | s23 | REF | 60% |
| 2095 | s23 | SNP | 60% |
| 2096 | s23 | REF | 65% |
| 2097 | s23 | REF | 65% |
| 2098 | s23 | SNP | 60% |
| 2099 | s23 | SNP | 55% |
| 2100 | s23 | REF | 60% |
| 2101 | s23 | SNP | 65% |
| 2102 | s23 | REF | 70% |
| 2103 | s23 | SNP | 65% |
| 2104 | s23 | REF | 60% |
| 2105 | s23 | SNP | 55% |
| 2106 | s23 | SNP | 60% |
| 2107 | s23 | SNP | 60% |
| 2108 | s23 | REF | 65% |
| 2109 | s23 | REF | 65% |
| 2110 | s23 | REF | 65% |
| 2111 | s23 | SNP | 60% |
| 2112 | s23 | SNP | 60% |
| 2113 | s23 | REF | 65% |
| 2114 | s23 | SNP | 60% |
| 2115 | s23 | SNP | 50% |
| 2116 | s23 | REF | 55% |
| 2117 | s24 | REF | 50% |
| 2118 | s24 | SNP | 45% |
| 2119 | s24 | REF | 40% |
| 2120 | s24 | SNP | 35% |
| 2121 | s24 | SNP | 30% |
| 2122 | s24 | REF | 40% |
| 2123 | s24 | SNP | 35% |
| 2124 | s24 | REF | 35% |
| 2125 | s24 | SNP | 45% |
| 2126 | s24 | REF | 50% |
| 2127 | s24 | REF | 55% |
| 2128 | s24 | REF | 40% |
| 2129 | s24 | SNP | 35% |
| 2130 | s24 | REF | 55% |
| 2131 | s24 | SNP | 50% |
| 2132 | s24 | REF | 50% |
| 2133 | s24 | SNP | 45% |
| 2134 | s24 | SNP | 50% |
| 2135 | s24 | REF | 55% |
| 2136 | s24 | SNP | 35% |
| 2137 | s24 | REF | 40% |
| 2138 | s24 | REF | 30% |
| 2139 | s24 | SNP | 45% |
| 2140 | s24 | REF | 50% |
| 2141 | s24 | SNP | 30% |
| 2142 | s24 | SNP | 50% |
| 2143 | s24 | SNP | 30% |
| 2144 | s24 | SNP | 50% |
| 2145 | s24 | REF | 55% |
| 2146 | s24 | REF | 55% |
| 2147 | s24 | REF | 40% |
| 2148 | s24 | SNP | 35% |
| 2149 | s24 | REF | 35% |
| 2150 | s24 | SNP | 50% |
| 2151 | s24 | REF | 55% |
| 2152 | s24 | SNP | 50% |
| 2153 | s24 | SNP | 50% |
| 2154 | s24 | REF | 55% |
| 2155 | s24 | SNP | 45% |
| 2156 | s24 | REF | 50% |
| 2157 | s24 | REF | 55% |
| 2158 | s24 | REF | 45% |
| 2159 | s24 | SNP | 40% |
| 2160 | s24 | SNP | 35% |
| 2161 | s24 | REF | 40% |
| 2162 | s24 | SNP | 40% |
| 2163 | s24 | REF | 45% |
| 2164 | s24 | REF | 55% |
| 2165 | s24 | SNP | 50% |
| 2166 | s24 | SNP | 50% |
| 2167 | s24 | REF | 55% |
| 2168 | s24 | SNP | 40% |
| 2169 | s24 | REF | 45% |
| 2170 | s24 | SNP | 35% |
| 2171 | s24 | REF | 40% |
| 2172 | s24 | REF | 35% |
| 2173 | s24 | REF | 45% |
| 2174 | s24 | SNP | 40% |
| 2175 | s24 | REF | 35% |
| 2176 | s24 | SNP | 30% |
| 2177 | s24 | SNP | 50% |
| 2178 | s24 | REF | 55% |
| 2179 | s24 | SNP | 35% |
| 2180 | s24 | REF | 40% |
| 2181 | s24 | SNP | 40% |
| 2182 | s24 | REF | 45% |
| 2183 | s24 | REF | 35% |
| 2184 | s24 | SNP | 30% |
| 2185 | s24 | SNP | 50% |
| 2186 | s24 | REF | 30% |
| 2187 | s14 | REF | 60% |
| 2188 | s14 | SNP | 55% |
| 2189 | s14 | REF | 55% |
| 2190 | s14 | REF | 65% |
| 2191 | s14 | SNP | 60% |
| 2192 | s14 | SNP | 50% |
| 2193 | s14 | SNP | 60% |
| 2194 | s14 | SNP | 55% |
| 2195 | s14 | SNP | 55% |
| 2196 | s14 | REF | 60% |
| 2197 | s14 | REF | 55% |
| 2198 | s14 | SNP | 50% |
| 2199 | s14 | REF | 55% |
| 2200 | s14 | REF | 60% |
| 2201 | s14 | SNP | 55% |
| 2202 | s14 | REF | 65% |
| 2203 | s14 | SNP | 60% |
| 2204 | s14 | SNP | 60% |
| 2205 | s14 | REF | 65% |
| 2206 | s14 | SNP | 60% |
| 2207 | s14 | REF | 65% |
| 2208 | s14 | SNP | 60% |
| 2209 | s14 | REF | 65% |
| 2210 | s14 | REF | 55% |
| 2211 | s14 | SNP | 50% |
| 2212 | s14 | SNP | 55% |
| 2213 | s14 | SNP | 60% |
| 2214 | s14 | SNP | 50% |
| 2215 | s14 | REF | 55% |
| 2216 | s14 | SNP | 60% |
| 2217 | s14 | SNP | 60% |
| 2218 | s14 | REF | 65% |
| 2219 | s14 | SNP | 60% |
| 2220 | s14 | SNP | 60% |
| 2221 | s14 | SNP | 60% |
| 2222 | s14 | REF | 65% |
| 2223 | s14 | SNP | 60% |
| 2224 | s14 | REF | 65% |
| 2225 | s14 | SNP | 60% |
| 2226 | s14 | SNP | 55% |
| 2227 | s14 | SNP | 50% |
| 2228 | s14 | REF | 55% |
| 2229 | s14 | REF | 65% |
| 2230 | s14 | SNP | 60% |
| 2231 | s14 | SNP | 60% |
| 2232 | s14 | REF | 65% |
| 2233 | s14 | SNP | 55% |
| 2234 | s14 | SNP | 50% |
| 2235 | s14 | SNP | 50% |
| 2236 | s25 | SNP | 50% |
| 2237 | s25 | SNP | 60% |
| 2238 | s25 | REF | 65% |
| 2239 | s25 | REF | 55% |
| 2240 | s25 | SNP | 50% |
| 2241 | s25 | REF | 65% |
| 2242 | s25 | SNP | 60% |
| 2243 | s25 | REF | 75% |
| 2244 | s25 | SNP | 70% |
| 2245 | s25 | REF | 60% |
| 2246 | s25 | SNP | 55% |
| 2247 | s25 | SNP | 60% |
| 2248 | s25 | REF | 65% |
| 2249 | s25 | REF | 75% |
| 2250 | s25 | SNP | 55% |
| 2251 | s25 | REF | 60% |
| 2252 | s25 | SNP | 65% |
| 2253 | s25 | REF | 70% |
| 2254 | s25 | SNP | 55% |
| 2255 | s25 | REF | 60% |
| 2256 | s25 | SNP | 60% |
| 2257 | s25 | REF | 65% |
| 2258 | s25 | SNP | 50% |
| 2259 | s25 | REF | 55% |
| 2260 | s25 | SNP | 60% |
| 2261 | s25 | REF | 65% |
| 2262 | s25 | REF | 55% |
| 2263 | s25 | REF | 65% |
| 2264 | s25 | SNP | 60% |
| 2265 | s25 | REF | 75% |
| 2266 | s25 | SNP | 70% |
| 2267 | s25 | REF | 60% |
| 2268 | s25 | SNP | 55% |
| 2269 | s25 | SNP | 65% |
| 2270 | s25 | REF | 70% |
| 2271 | s25 | SNP | 55% |
| 2272 | s25 | REF | 60% |
| 2273 | s25 | SNP | 65% |
| 2274 | s25 | REF | 70% |
| 2275 | s25 | REF | 70% |
| 2276 | s25 | SNP | 65% |
| 2277 | s25 | REF | 60% |
| 2278 | s25 | SNP | 55% |
| 2279 | s25 | SNP | 70% |
| 2280 | s25 | REF | 75% |
| 2281 | s25 | SNP | 55% |
| 2282 | s25 | REF | 60% |
| 2283 | s25 | REF | 70% |
| 2284 | s25 | SNP | 65% |
| 2285 | s25 | SNP | 70% |
| 2286 | s25 | REF | 75% |
| 2287 | s25 | REF | 75% |
| 2288 | s25 | SNP | 70% |
| 2289 | s25 | REF | 75% |
| 2290 | s25 | SNP | 70% |
| 2291 | s25 | SNP | 45% |
| 2292 | s25 | SNP | 70% |
| 2293 | s25 | REF | 50% |
| 2294 | s25 | REF | 70% |
| 2295 | s25 | SNP | 65% |
| 2296 | s25 | SNP | 55% |
| 2297 | s25 | REF | 60% |
| 2298 | s25 | SNP | 70% |
| 2299 | s25 | REF | 75% |
| 2300 | s25 | REF | 65% |
| 2301 | s25 | SNP | 60% |
| 2302 | s26 | REF | 50% |
| 2303 | s26 | SNP | 55% |
| 2304 | s26 | SNP | 55% |
| 2305 | s26 | REF | 50% |
| 2306 | s26 | REF | 50% |
| 2307 | s26 | SNP | 55% |
| 2308 | s26 | REF | 50% |
| 2309 | s26 | SNP | 55% |
| 2310 | s26 | REF | 55% |
| 2311 | s26 | SNP | 60% |
| 2312 | s26 | REF | 50% |
| 2313 | s26 | SNP | 55% |
| 2314 | s26 | REF | 50% |
| 2315 | s26 | SNP | 55% |
| 2316 | s26 | SNP | 55% |
| 2317 | s26 | REF | 50% |
| 2318 | s26 | REF | 55% |
| 2319 | s26 | SNP | 60% |
| 2320 | s26 | SNP | 55% |
| 2321 | s26 | REF | 50% |
| 2322 | s26 | REF | 50% |
| 2323 | s26 | SNP | 55% |
| 2324 | s26 | REF | 55% |
| 2325 | s26 | SNP | 60% |
| 2326 | s26 | REF | 50% |
| 2327 | s26 | SNP | 55% |
| 2328 | s26 | SNP | 60% |
| 2329 | s26 | REF | 55% |
| 2330 | s26 | SNP | 55% |
| 2331 | s26 | REF | 50% |
| 2332 | s26 | REF | 50% |
| 2333 | s26 | SNP | 55% |
| 2334 | s26 | SNP | 55% |
| 2335 | s26 | REF | 50% |
| 2336 | s26 | REF | 50% |
| 2337 | s26 | SNP | 55% |
| 2338 | s26 | SNP | 55% |
| 2339 | s26 | REF | 50% |
| 2340 | s26 | SNP | 60% |
| 2341 | s26 | SNP | 60% |
| 2342 | s26 | REF | 55% |
| 2343 | s26 | REF | 55% |
| 2344 | s26 | SNP | 55% |
| 2345 | s26 | REF | 50% |
| 2346 | s26 | REF | 50% |
| 2347 | s26 | SNP | 55% |
| 2348 | s26 | SNP | 55% |
| 2349 | s26 | SNP | 55% |
| 2350 | s26 | REF | 50% |
| 2351 | s26 | SNP | 55% |
| 2352 | s26 | REF | 50% |
| 2353 | s26 | SNP | 60% |
| 2354 | s26 | SNP | 60% |
| 2355 | s26 | REF | 55% |
| 2356 | s26 | REF | 55% |
| 2357 | s26 | REF | 50% |
| 2358 | s26 | REF | 55% |
| 2359 | s26 | SNP | 60% |
| 2360 | s26 | SNP | 60% |
| 2361 | s26 | REF | 55% |
| 2362 | s27 | SNP | 45% |
| 2363 | s27 | REF | 55% |
| 2364 | s27 | SNP | 50% |
| 2365 | s27 | REF | 50% |
| 2366 | s27 | SNP | 45% |
| 2367 | s27 | REF | 60% |
| 2368 | s27 | SNP | 55% |
| 2369 | s27 | REF | 50% |
| 2370 | s27 | SNP | 45% |
| 2371 | s27 | SNP | 50% |
| 2372 | s27 | REF | 55% |
| 2373 | s27 | REF | 60% |
| 2374 | s27 | REF | 60% |
| 2375 | s27 | SNP | 55% |
| 2376 | s27 | SNP | 55% |
| 2377 | s27 | REF | 60% |
| 2378 | s27 | SNP | 60% |
| 2379 | s27 | REF | 65% |
| 2380 | s27 | REF | 55% |
| 2381 | s27 | SNP | 50% |
| 2382 | s27 | SNP | 55% |
| 2383 | s27 | REF | 60% |
| 2384 | s27 | REF | 60% |
| 2385 | s27 | SNP | 55% |
| 2386 | s27 | REF | 55% |
| 2387 | s27 | SNP | 50% |
| 2388 | s27 | REF | 55% |
| 2389 | s27 | SNP | 50% |
| 2390 | s27 | SNP | 50% |
| 2391 | s27 | REF | 55% |
| 2392 | s27 | REF | 60% |
| 2393 | s27 | SNP | 55% |
| 2394 | s27 | REF | 50% |
| 2395 | s27 | SNP | 55% |
| 2396 | s27 | REF | 60% |
| 2397 | s27 | SNP | 50% |
| 2398 | s27 | REF | 55% |
| 2399 | s27 | REF | 55% |
| 2400 | s27 | SNP | 50% |
| 2401 | s27 | SNP | 50% |
| 2402 | s27 | REF | 55% |
| 2403 | s27 | SNP | 55% |
| 2404 | s27 | REF | 60% |
| 2405 | s27 | SNP | 50% |
| 2406 | s27 | REF | 55% |
| 2407 | s27 | SNP | 55% |
| 2408 | s27 | REF | 60% |
| 2409 | s27 | SNP | 55% |
| 2410 | s27 | REF | 60% |
| 2411 | s27 | REF | 60% |
| 2412 | s27 | SNP | 55% |
| 2413 | s27 | SNP | 50% |
| 2414 | s27 | REF | 55% |
| 2415 | s27 | REF | 50% |
| 2416 | s27 | SNP | 45% |
| 2417 | s27 | SNP | 50% |
| 2418 | s27 | REF | 55% |
| 2419 | s27 | SNP | 55% |
| 2420 | s27 | REF | 60% |
| 2421 | s27 | SNP | 55% |
| 2422 | s27 | REF | 50% |
| 2423 | s27 | SNP | 45% |
| 2424 | s27 | SNP | 45% |
| 2425 | s27 | REF | 50% |
| 2426 | s18 | SNP | 40% |
| 2427 | s18 | SNP | 45% |
| 2428 | s18 | SNP | 40% |
| 2429 | s18 | SNP | 45% |
| 2430 | s18 | SNP | 45% |
| 2431 | s18 | SNP | 50% |
| 2432 | s18 | REF | 50% |
| 2433 | s18 | SNP | 50% |
| 2434 | s18 | SNP | 45% |
| 2435 | s18 | SNP | 45% |
| 2436 | s18 | SNP | 50% |
| 2437 | s18 | SNP | 50% |
| 2438 | s18 | SNP | 50% |
| 2439 | s18 | SNP | 50% |
| 2440 | s18 | REF | 50% |
| 2441 | s18 | SNP | 50% |
| 2442 | s18 | SNP | 50% |
| 2443 | s18 | SNP | 50% |
| 2444 | s18 | SNP | 55% |
| 2445 | s18 | SNP | 55% |
| 2446 | s18 | REF | 55% |
| 2447 | s18 | REF | 50% |
| 2448 | s18 | SNP | 50% |
| 2449 | s18 | SNP | 50% |
| 2450 | s18 | SNP | 50% |
| 2451 | s18 | SNP | 55% |
| 2452 | s18 | SNP | 55% |
| 2453 | s18 | SNP | 50% |
| 2454 | s18 | REF | 55% |
| 2455 | s18 | SNP | 55% |
| 2456 | s18 | REF | 55% |
| 2457 | s18 | SNP | 55% |
| 2458 | s18 | SNP | 45% |
| 2459 | s18 | SNP | 50% |
| 2460 | s18 | REF | 50% |
| 2461 | s18 | REF | 50% |
| 2462 | s18 | SNP | 50% |
| 2463 | s18 | SNP | 45% |
| 2464 | s28 | REF | 35% |
| 2465 | s28 | SNP | 45% |
| 2466 | s28 | REF | 40% |
| 2467 | s28 | REF | 45% |
| 2468 | s28 | SNP | 50% |
| 2469 | s28 | REF | 55% |
| 2470 | s28 | SNP | 60% |
| 2471 | s28 | REF | 65% |
| 2472 | s28 | SNP | 70% |
| 2473 | s28 | REF | 40% |
| 2474 | s28 | REF | 65% |
| 2475 | s28 | SNP | 70% |
| 2476 | s28 | SNP | 70% |
| 2477 | s28 | SNP | 45% |
| 2478 | s28 | REF | 65% |
| 2479 | s28 | SNP | 50% |
| 2480 | s28 | REF | 45% |
| 2481 | s28 | SNP | 65% |
| 2482 | s28 | REF | 60% |
| 2483 | s28 | SNP | 65% |
| 2484 | s28 | REF | 60% |
| 2485 | s28 | SNP | 50% |
| 2486 | s28 | REF | 45% |
| 2487 | s28 | REF | 45% |
| 2488 | s28 | SNP | 50% |
| 2489 | s28 | SNP | 40% |
| 2490 | s28 | REF | 45% |
| 2491 | s28 | SNP | 50% |
| 2492 | s28 | REF | 50% |
| 2493 | s28 | SNP | 55% |
| 2494 | s28 | REF | 60% |
| 2495 | s28 | SNP | 65% |
| 2496 | s28 | REF | 55% |
| 2497 | s28 | SNP | 60% |
| 2498 | s28 | REF | 60% |
| 2499 | s28 | SNP | 65% |
| 2500 | s28 | REF | 50% |
| 2501 | s28 | SNP | 55% |
| 2502 | s28 | REF | 45% |
| 2503 | s28 | SNP | 50% |
| 2504 | s28 | REF | 60% |
| 2505 | s28 | SNP | 65% |
| 2506 | s28 | SNP | 55% |
| 2507 | s28 | REF | 50% |
| 2508 | s28 | REF | 45% |
| 2509 | s28 | SNP | 50% |
| 2510 | s28 | SNP | 50% |
| 2511 | s28 | REF | 45% |
| 2512 | s28 | SNP | 40% |
| 2513 | s28 | REF | 35% |
| 2514 | s28 | REF | 45% |
| 2515 | s28 | SNP | 50% |
| 2516 | s28 | SNP | 50% |
| 2517 | s28 | REF | 45% |
| 2518 | s28 | SNP | 60% |
| 2519 | s28 | REF | 55% |
| 2520 | s28 | SNP | 60% |
| 2521 | s28 | REF | 55% |
| 2522 | s28 | SNP | 50% |
| 2523 | s28 | REF | 45% |
| 2524 | s28 | SNP | 65% |
| 2525 | s28 | REF | 60% |
| 2526 | s28 | SNP | 60% |
| 2527 | s28 | REF | 55% |
| 2528 | s28 | SNP | 55% |
| 2529 | s28 | REF | 50% |
| 2530 | s28 | SNP | 50% |
| 2531 | s28 | REF | 45% |
| 2532 | s29 | REF | 50% |
| 2533 | s29 | SNP | 45% |
| 2534 | s29 | REF | 50% |
| 2535 | s29 | SNP | 45% |
| 2536 | s29 | SNP | 45% |
| 2537 | s29 | REF | 50% |
| 2538 | s29 | REF | 50% |
| 2539 | s29 | SNP | 45% |
| 2540 | s29 | SNP | 45% |
| 2541 | s29 | REF | 50% |
| 2542 | s29 | SNP | 45% |
| 2543 | s29 | REF | 50% |
| 2544 | s29 | SNP | 45% |
| 2545 | s29 | REF | 50% |
| 2546 | s29 | SNP | 45% |
| 2547 | s29 | REF | 50% |
| 2548 | s29 | SNP | 45% |
| 2549 | s29 | REF | 50% |
| 2550 | s29 | REF | 50% |
| 2551 | s29 | SNP | 45% |
| 2552 | s29 | REF | 50% |
| 2553 | s29 | SNP | 45% |
| 2554 | s29 | REF | 50% |
| 2555 | s29 | SNP | 45% |
| 2556 | s29 | SNP | 40% |
| 2557 | s29 | REF | 45% |
| 2558 | s29 | SNP | 45% |
| 2559 | s29 | REF | 50% |
| 2560 | s29 | REF | 45% |
| 2561 | s29 | SNP | 40% |
| 2562 | s29 | REF | 50% |
| 2563 | s29 | SNP | 45% |
| 2564 | s29 | SNP | 45% |
| 2565 | s29 | REF | 50% |
| 2566 | s29 | SNP | 45% |
| 2567 | s29 | REF | 50% |
| 2568 | s29 | REF | 50% |
| 2569 | s29 | SNP | 45% |
| 2570 | s29 | REF | 50% |
| 2571 | s29 | SNP | 45% |
| 2572 | s29 | REF | 50% |
| 2573 | s29 | SNP | 45% |
| 2574 | s29 | SNP | 45% |
| 2575 | s29 | REF | 50% |
| 2576 | s29 | SNP | 45% |
| 2577 | s29 | REF | 50% |
| 2578 | s29 | REF | 50% |
| 2579 | s29 | SNP | 45% |
| 2580 | s29 | SNP | 40% |
| 2581 | s29 | REF | 45% |
| 2582 | s29 | SNP | 40% |
| 2583 | s29 | REF | 45% |
| 2584 | s29 | REF | 50% |
| 2585 | s29 | SNP | 45% |
| 2586 | s29 | SNP | 45% |
| 2587 | s29 | REF | 50% |
| 2588 | s29 | REF | 50% |
| 2589 | s29 | SNP | 45% |
| 2590 | s29 | REF | 45% |
| 2591 | s29 | SNP | 40% |
| 2592 | s30 | REF | 30% |
| 2593 | s30 | REF | 30% |
| 2594 | s30 | REF | 35% |
| 2595 | s30 | SNP | 30% |
| 2596 | s30 | REF | 30% |
| 2597 | s30 | REF | 35% |
| 2598 | s30 | SNP | 30% |
| 2599 | s30 | REF | 30% |
| 2600 | s30 | SNP | 30% |
| 2601 | s30 | REF | 35% |
| 2602 | s30 | SNP | 35% |
| 2603 | s30 | REF | 40% |
| 2604 | s30 | SNP | 35% |
| 2605 | s30 | SNP | 40% |
| 2606 | s30 | REF | 45% |
| 2607 | s30 | REF | 30% |
| 2608 | s30 | REF | 30% |
| 2609 | s30 | REF | 30% |
| 2610 | s30 | SNP | 30% |
| 2611 | s30 | REF | 35% |
| 2612 | s30 | SNP | 35% |
| 2613 | s30 | REF | 40% |
| 2614 | s31 | REF | 65% |
| 2615 | s31 | SNP | 60% |
| 2616 | s31 | REF | 70% |
| 2617 | s31 | SNP | 65% |
| 2618 | s31 | REF | 70% |
| 2619 | s31 | SNP | 55% |
| 2620 | s31 | REF | 60% |
| 2621 | s31 | SNP | 65% |
| 2622 | s31 | REF | 70% |
| 2623 | s31 | SNP | 65% |
| 2624 | s31 | REF | 60% |
| 2625 | s31 | SNP | 55% |
| 2626 | s31 | REF | 75% |
| 2627 | s31 | SNP | 60% |
| 2628 | s31 | REF | 65% |
| 2629 | s31 | REF | 60% |
| 2630 | s31 | SNP | 55% |
| 2631 | s31 | SNP | 60% |
| 2632 | s31 | REF | 65% |
| 2633 | s31 | SNP | 60% |
| 2634 | s31 | REF | 65% |
| 2635 | s31 | REF | 65% |
| 2636 | s31 | SNP | 60% |
| 2637 | s31 | REF | 60% |
| 2638 | s31 | SNP | 55% |
| 2639 | s31 | SNP | 60% |
| 2640 | s31 | REF | 65% |
| 2641 | s31 | SNP | 55% |
| 2642 | s31 | REF | 60% |
| 2643 | s31 | SNP | 60% |
| 2644 | s31 | REF | 65% |
| 2645 | s31 | REF | 65% |
| 2646 | s31 | SNP | 60% |
| 2647 | s31 | SNP | 70% |
| 2648 | s31 | REF | 75% |
| 2649 | s31 | SNP | 60% |
| 2650 | s31 | SNP | 65% |
| 2651 | s31 | REF | 70% |
| 2652 | s31 | REF | 65% |
| 2653 | s31 | SNP | 60% |
| 2654 | s31 | SNP | 60% |
| 2655 | s31 | REF | 65% |
| 2656 | s31 | REF | 65% |
| 2657 | s31 | SNP | 60% |
| 2658 | s31 | SNP | 55% |
| 2659 | s31 | REF | 60% |
| 2660 | s31 | SNP | 65% |
| 2661 | s31 | REF | 65% |
| 2662 | s31 | SNP | 60% |
| 2663 | s31 | REF | 65% |
| 2664 | s31 | SNP | 60% |
| 2665 | s31 | REF | 70% |
| 2666 | s31 | REF | 65% |
| 2667 | s31 | REF | 65% |
| 2668 | s31 | SNP | 60% |
| 2669 | s31 | SNP | 70% |
| 2670 | s31 | SNP | 60% |
| 2671 | s31 | REF | 65% |
| 2672 | s31 | REF | 65% |
| 2673 | s31 | SNP | 60% |
| 2674 | s31 | SNP | 60% |
| 2675 | s31 | REF | 65% |
| 2676 | s32 | REF | 55% |
| 2677 | s32 | SNP | 60% |
| 2678 | s32 | REF | 55% |
| 2679 | s32 | REF | 40% |
| 2680 | s32 | SNP | 45% |
| 2681 | s32 | SNP | 60% |
| 2682 | s32 | REF | 55% |
| 2683 | s32 | REF | 55% |
| 2684 | s32 | SNP | 60% |
| 2685 | s32 | REF | 45% |
| 2686 | s32 | SNP | 50% |
| 2687 | s32 | REF | 50% |
| 2688 | s32 | SNP | 55% |
| 2689 | s32 | REF | 50% |
| 2690 | s32 | SNP | 55% |
| 2691 | s32 | SNP | 60% |
| 2692 | s32 | REF | 55% |
| 2693 | s32 | SNP | 60% |
| 2694 | s32 | REF | 55% |
| 2695 | s32 | SNP | 60% |
| 2696 | s32 | REF | 55% |
| 2697 | s32 | SNP | 65% |
| 2698 | s32 | SNP | 60% |
| 2699 | s32 | REF | 55% |
| 2700 | s32 | SNP | 60% |
| 2701 | s32 | REF | 55% |
| 2702 | s32 | SNP | 55% |
| 2703 | s32 | SNP | 55% |
| 2704 | s32 | REF | 50% |
| 2705 | s32 | REF | 50% |
| 2706 | s32 | REF | 55% |
| 2707 | s32 | REF | 55% |
| 2708 | s32 | SNP | 60% |
| 2709 | s32 | SNP | 60% |
| 2710 | s32 | REF | 55% |
| 2711 | s32 | SNP | 60% |
| 2712 | s32 | SNP | 60% |
| 2713 | s32 | REF | 55% |
| 2714 | s32 | REF | 55% |
| 2715 | s32 | SNP | 60% |
| 2716 | s32 | SNP | 60% |
| 2717 | s32 | REF | 55% |
| 2718 | s32 | SNP | 60% |
| 2719 | s32 | REF | 60% |
| 2720 | s32 | SNP | 50% |
| 2721 | s32 | REF | 45% |
| 2722 | s32 | SNP | 60% |
| 2723 | s32 | REF | 55% |
| 2724 | s32 | SNP | 55% |
| 2725 | s32 | REF | 50% |
| 2726 | s32 | REF | 60% |
| 2727 | s32 | SNP | 65% |
| 2728 | s33 | REF | 40% |
| 2729 | s33 | SNP | 35% |
| 2730 | s33 | SNP | 30% |
| 2731 | s33 | REF | 35% |
| 2732 | s33 | REF | 40% |
| 2733 | s33 | SNP | 35% |
| 2734 | s33 | REF | 40% |
| 2735 | s33 | SNP | 35% |
| 2736 | s33 | REF | 35% |
| 2737 | s33 | SNP | 30% |
| 2738 | s33 | SNP | 35% |
| 2739 | s33 | REF | 40% |
| 2740 | s33 | SNP | 30% |
| 2741 | s33 | REF | 35% |
| 2742 | s33 | SNP | 30% |
| 2743 | s33 | REF | 35% |
| 2744 | s33 | REF | 35% |
| 2745 | s33 | SNP | 30% |
| 2746 | s33 | SNP | 35% |
| 2747 | s33 | REF | 40% |
| 2748 | s33 | SNP | 35% |
| 2749 | s33 | REF | 40% |
| 2750 | s33 | REF | 30% |
| 2751 | s33 | REF | 35% |
| 2752 | s33 | SNP | 30% |
| 2753 | s33 | REF | 30% |
| 2754 | s33 | SNP | 35% |
| 2755 | s33 | REF | 40% |
| 2756 | s33 | SNP | 30% |
| 2757 | s33 | REF | 35% |
| 2758 | s33 | REF | 40% |
| 2759 | s33 | SNP | 35% |
| 2760 | s33 | REF | 40% |
| 2761 | s33 | SNP | 35% |
| 2762 | s33 | REF | 30% |
| 2763 | s33 | REF | 35% |
| 2764 | s33 | SNP | 30% |
| 2765 | s33 | SNP | 30% |
| 2766 | s33 | REF | 40% |
| 2767 | s33 | SNP | 35% |
| 2768 | s33 | SNP | 35% |
| 2769 | s33 | REF | 40% |
| 2770 | s33 | SNP | 30% |
| 2771 | s33 | REF | 35% |
| 2772 | s33 | REF | 35% |
| 2773 | s33 | REF | 35% |
| 2774 | s33 | SNP | 30% |
| 2775 | s33 | REF | 30% |
| 2776 | s35 | SNP | 65% |
| 2777 | s35 | SNP | 55% |
| 2778 | s35 | REF | 60% |
| 2779 | s35 | SNP | 60% |
| 2780 | s35 | REF | 65% |
| 2781 | s35 | SNP | 55% |
| 2782 | s35 | SNP | 55% |
| 2783 | s35 | SNP | 60% |
| 2784 | s35 | SNP | 55% |
| 2785 | s35 | SNP | 60% |
| 2786 | s35 | SNP | 65% |
| 2787 | s35 | SNP | 60% |
| 2788 | s35 | SNP | 55% |
| 2789 | s35 | REF | 65% |
| 2790 | s35 | SNP | 55% |
| 2791 | s35 | REF | 60% |
| 2792 | s35 | REF | 70% |
| 2793 | s35 | REF | 65% |
| 2794 | s35 | SNP | 60% |
| 2795 | s35 | SNP | 60% |
| 2796 | s35 | REF | 65% |
| 2797 | s35 | SNP | 60% |
| 2798 | s35 | REF | 65% |
| 2799 | s35 | SNP | 60% |
| 2800 | s35 | REF | 70% |
| 2801 | s35 | SNP | 65% |
| 2802 | s35 | SNP | 55% |
| 2803 | s35 | SNP | 65% |
| 2804 | s35 | SNP | 50% |
| 2805 | s35 | SNP | 65% |
| 2806 | s35 | SNP | 60% |
| 2807 | s35 | SNP | 55% |
| 2808 | s35 | SNP | 45% |
| 2809 | s35 | SNP | 60% |
| 2810 | s35 | SNP | 55% |
| 2811 | s35 | REF | 65% |
| 2812 | s35 | SNP | 60% |
| 2813 | s35 | SNP | 60% |
| 2814 | s35 | SNP | 55% |
| 2815 | s35 | SNP | 50% |
| 2816 | s35 | SNP | 45% |
| 2817 | s36 | REF | 35% |
| 2818 | s36 | REF | 60% |
| 2819 | s36 | SNP | 65% |
| 2820 | s36 | REF | 45% |
| 2821 | s36 | SNP | 50% |
| 2822 | s36 | REF | 50% |
| 2823 | s36 | SNP | 55% |
| 2824 | s36 | REF | 65% |
| 2825 | s36 | SNP | 70% |
| 2826 | s36 | SNP | 55% |
| 2827 | s36 | REF | 50% |
| 2828 | s36 | SNP | 40% |
| 2829 | s36 | REF | 35% |
| 2830 | s36 | SNP | 50% |
| 2831 | s36 | REF | 45% |
| 2832 | s36 | SNP | 55% |
| 2833 | s36 | REF | 50% |
| 2834 | s36 | REF | 50% |
| 2835 | s36 | SNP | 55% |
| 2836 | s36 | REF | 55% |
| 2837 | s36 | SNP | 60% |
| 2838 | s36 | SNP | 70% |
| 2839 | s36 | REF | 35% |
| 2840 | s36 | SNP | 40% |
| 2841 | s36 | SNP | 40% |
| 2842 | s36 | REF | 60% |
| 2843 | s36 | SNP | 65% |
| 2844 | s36 | REF | 50% |
| 2845 | s36 | SNP | 55% |
| 2846 | s36 | SNP | 40% |
| 2847 | s36 | REF | 35% |
| 2848 | s36 | REF | 55% |
| 2849 | s36 | SNP | 60% |
| 2850 | s36 | REF | 40% |
| 2851 | s36 | SNP | 45% |
| 2852 | s36 | SNP | 55% |
| 2853 | s36 | REF | 50% |
| 2854 | s36 | REF | 50% |
| 2855 | s36 | SNP | 55% |
| 2856 | s36 | REF | 60% |
| 2857 | s36 | SNP | 65% |
| 2858 | s36 | REF | 45% |
| 2859 | s36 | SNP | 50% |
| 2860 | s36 | REF | 50% |
| 2861 | s36 | SNP | 55% |
| 2862 | s36 | REF | 65% |
| 2863 | s36 | SNP | 70% |
| 2864 | s36 | SNP | 60% |
| 2865 | s36 | REF | 55% |
| 2866 | s36 | SNP | 65% |
| 2867 | s36 | REF | 60% |
| 2868 | s36 | SNP | 45% |
| 2869 | s36 | REF | 40% |
| 2870 | s36 | SNP | 70% |
| 2871 | s36 | REF | 60% |
| 2872 | s36 | SNP | 65% |
| 2873 | s36 | SNP | 40% |
| 2874 | s36 | REF | 35% |
| 2875 | s36 | SNP | 50% |
| 2876 | s36 | REF | 45% |
| 2877 | s36 | SNP | 65% |
| 2878 | s36 | REF | 60% |
| 2879 | s36 | REF | 65% |
| 2880 | s36 | SNP | 65% |
| 2881 | s36 | SNP | 60% |
| 2882 | s36 | REF | 55% |
| 2883 | s36 | REF | 65% |
| 2884 | s36 | SNP | 65% |
| 2885 | s36 | REF | 60% |
| 2886 | s36 | REF | 60% |
| 2887 | s37 | SNP | 45% |
| 2888 | s37 | SNP | 55% |
| 2889 | s37 | REF | 55% |
| 2890 | s37 | REF | 45% |
| 2891 | s37 | REF | 50% |
| 2892 | s37 | SNP | 50% |
| 2893 | s37 | SNP | 50% |
| 2894 | s37 | REF | 50% |
| 2895 | s37 | REF | 60% |
| 2896 | s37 | SNP | 60% |
| 2897 | s37 | SNP | 55% |
| 2898 | s37 | REF | 55% |
| 2899 | s37 | SNP | 50% |
| 2900 | s37 | REF | 50% |
| 2901 | s37 | SNP | 50% |
| 2902 | s37 | SNP | 50% |
| 2903 | s37 | SNP | 60% |
| 2904 | s37 | REF | 60% |
| 2905 | s37 | REF | 50% |
| 2906 | s37 | SNP | 55% |
| 2907 | s37 | REF | 55% |
| 2908 | s37 | SNP | 60% |
| 2909 | s37 | REF | 60% |
| 2910 | s37 | SNP | 55% |
| 2911 | s37 | REF | 55% |
| 2912 | s37 | REF | 55% |
| 2913 | s37 | SNP | 55% |
| 2914 | s37 | REF | 60% |
| 2915 | s37 | REF | 55% |
| 2916 | s37 | SNP | 55% |
| 2917 | s37 | REF | 50% |
| 2918 | s37 | SNP | 50% |
| 2919 | s37 | REF | 60% |
| 2920 | s37 | REF | 50% |
| 2921 | s37 | SNP | 60% |
| 2922 | s37 | SNP | 50% |
| 2923 | s37 | REF | 50% |
| 2924 | s37 | SNP | 55% |
| 2925 | s37 | REF | 55% |
| 2926 | s37 | SNP | 60% |
| 2927 | s37 | SNP | 55% |
| 2928 | s37 | SNP | 60% |
| 2929 | s37 | REF | 60% |
| 2930 | s37 | REF | 55% |
| 2931 | s37 | REF | 55% |
| 2932 | s37 | SNP | 55% |
| 2933 | s37 | REF | 50% |
| 2934 | s37 | SNP | 50% |
| 2935 | s37 | SNP | 50% |
| 2936 | s37 | SNP | 60% |
| 2937 | s37 | REF | 60% |
| 2938 | s37 | REF | 50% |
| 2939 | s37 | REF | 50% |
| 2940 | s37 | SNP | 50% |
| 2941 | s38 | SNP | 65% |
| 2942 | s38 | REF | 60% |
| 2943 | s38 | SNP | 55% |
| 2944 | s38 | REF | 65% |
| 2945 | s38 | SNP | 60% |
| 2946 | s38 | REF | 70% |
| 2947 | s38 | SNP | 65% |
| 2948 | s38 | SNP | 65% |
| 2949 | s38 | REF | 70% |
| 2950 | s38 | REF | 65% |
| 2951 | s38 | SNP | 60% |
| 2952 | s38 | SNP | 65% |
| 2953 | s38 | REF | 70% |
| 2954 | s38 | SNP | 65% |
| 2955 | s38 | REF | 65% |
| 2956 | s38 | SNP | 60% |
| 2957 | s38 | REF | 70% |
| 2958 | s38 | REF | 70% |
| 2959 | s38 | SNP | 65% |
| 2960 | s38 | REF | 70% |
| 2961 | s38 | REF | 70% |
| 2962 | s38 | SNP | 65% |
| 2963 | s38 | SNP | 60% |
| 2964 | s38 | REF | 65% |
| 2965 | s38 | REF | 65% |
| 2966 | s38 | SNP | 60% |
| 2967 | s38 | REF | 70% |
| 2968 | s38 | SNP | 65% |
| 2969 | s38 | SNP | 65% |
| 2970 | s38 | REF | 70% |
| 2971 | s38 | SNP | 65% |
| 2972 | s38 | REF | 70% |
| 2973 | s38 | SNP | 65% |
| 2974 | s38 | REF | 70% |
| 2975 | s38 | SNP | 65% |
| 2976 | s38 | REF | 70% |
| 2977 | s38 | REF | 70% |
| 2978 | s38 | SNP | 65% |
| 2979 | s38 | SNP | 60% |
| 2980 | s38 | REF | 65% |
| 2981 | s38 | REF | 65% |
| 2982 | s38 | SNP | 60% |
| 2983 | s38 | SNP | 65% |
| 2984 | s38 | REF | 70% |
| 2985 | s38 | REF | 70% |
| 2986 | s38 | REF | 70% |
| 2987 | s38 | SNP | 65% |
| 2988 | s38 | REF | 70% |
| 2989 | s38 | SNP | 65% |
| 2990 | s38 | REF | 70% |
| 2991 | s38 | SNP | 65% |
| 2992 | s38 | REF | 70% |
| 2993 | s38 | SNP | 65% |
| 2994 | s38 | REF | 70% |
| 2995 | s38 | SNP | 60% |
| 2996 | s38 | REF | 65% |
| 2997 | s38 | SNP | 60% |
| 2998 | s38 | REF | 65% |
| 2999 | s38 | SNP | 65% |
| 3000 | s38 | SNP | 60% |
| 3001 | s38 | REF | 65% |
| 3002 | s38 | REF | 65% |
| 3003 | s38 | SNP | 60% |
| 3004 | s38 | SNP | 65% |
| 3005 | s38 | SNP | 60% |
| 3006 | s38 | REF | 65% |
| 3007 | s38 | REF | 70% |
| 3008 | s38 | SNP | 65% |
| 3009 | s38 | SNP | 55% |
| 3010 | s38 | REF | 60% |

[0154] Examples are provided below to facilitate a more complete understanding of the invention. The following examples illustrate the exemplary modes of making and practicing the invention. However, the scope of the invention is not limited to specific embodiments disclosed in these Examples, which are for purposes of illustration only.

### EXPERIMENTAL DETAILS

### Example 1

### Rho Correction Anaylsis

[0155] Guide sequences comprising 17-20 nucleotides in the sequences of 17-20 contiguous nucleotides set forth in SEQ ID NOs: 1-3010 are screened for high on target activity. On target activity is determined by DNA capillary electrophoresis analysis.

[0156] According to DNA capillary electrophoresis analysis, guide sequences comprising 17-20 nucleotides in the sequences of 17-20 contiguous nucleotides set forth in SEQ ID NOs: 1-3010 are found to be suitable for correction of the Rho gene.

### Discussion

[0157] The guide sequences of the present invention are determined to be suitable for targeting the Rho gene.

### REFERENCES

[0158] 1. Ahmad and Allen (1992) “Antibody-mediated Specific Binging and Cytotoxicity of Lipsome-entrapped Doxorubicin to Lung Cancer Cells in Vitro”, Cancer Research 52:4817-20
[0159] 2. Anders (1992) “Human gene therapy”, Science 256:808-13
[0160] 3. Basha et al. (2011) “Influence of Cationic Lipid Composition on Gene Silencing Properties of Lipid Nanoparticle Formulations of siRNA in Antigen-Presenting Cells”, Mol. Ther. 19(12):2186-200
[0161] 4. Behr (1994) Gene transfer with synthetic cationic amphiphiles: Prospects for gene therapy”, Bioconjuage Chem 5:382-89
[0162] 5. Blaese (1995) “Vectors in cancer therapy: how will they deliver”, Cancer Gene Ther. 2:291-97
[0163] 6. Blaese et al. (1995) “T lympocyte-directed gene therapy for ADA-SCID: initial trial results after 4 years”, Science 270(5235):475-80
[0164] 7. Buchschacher and Panganiban (1992) “Human immunodeficiency virus vectors for inducible expression of foreign genes”, J. Virol. 66:2731-39
[0165] 8. Burstein et al. (2017) “New CRISPR-Cas systems from uncultivated microbes”, Nature 542:237-41
[0166] 9. Chung et al. (2006) “Agrobacterium is not alone: gene transfer to plants by viruses and other bacteria”, Trends Plant Sci. 11(1):1-4
[0167] 10. Coelho et al. (2013) “Safety and Efficacy of RNAi Therapy for Transthyretin Amyloidosis”, N Engl J. Med 369:819-29
[0168] 11. Crystal (1995) “Transfer of genes to humans: early lessons and obstacles to success”, Science 270(5235):404-10
[0169] 12. Dillon (1993) “Regulation gene expression in gene therapy” Trends in Biotechnology
[0170] 13. Dranoff et al. (1997) “A phase I study of vaccination with autologous, irradiated melanoma cells engineered to secrete human granulocyte macrophage colony stimulating factor”, Hum. Gene Ther. 8(1):111-23
[0171] 14. Dunbar et al. (1995) “Retrovirally marked CD34-enriched peripheral blood and bone marrow cells contribute to long-term engraftment after autologous transplantation”, Blood 85:3048-57
[0172] 15. Ellem et al. (1997) “A case report: immune responses and clinical course of the first human use of ganulocyte/macrophage-colony-stimulating-factor-tranduced autologous melanoma cells for immunotherapy”, Cancer Immunol Immunother 44:10-20
[0173] 16. Gao and Huang (1995) “Cationic liposome-mediated gene transfer” Gene Ther. 2(10):710-22
[0174] 17. Haddada et al. (1995) “Gene Therapy Using Adenovirus Vectors”, in: The Molecular Repertoire of Adenoviruses III: Biology and Pathogenesis, ed. Doerfler and Bohm, pp. 297-306
[0175] 18. Han et al. (1995) “Ligand-directed retro-viral targeting of human breast cancer cells”, Proc Natl Acad Sci U.S.A. 92(21):9747-51
[0176] 19. Inaba et al. (1992) “Generation of large numbers of dendritic cells from mouse bone marrow cultures supplemented with granulocyte/macrophage colony-stimulating factor”, J Exp Med. 176(6):1693-702
[0177] 20. Jinek et al. (2012) “A programmable dual-RNA-guided DNA endonuclease in adaptive bacterial immunity,” Science 337(6096):816-21
[0178] 21. Johan et al. (1992) “GLVR1, a receptor for gibbon ape leukemia virus, is homologous to a phosphate permease of Neurospora crassa and is expressed at high levels in the brain and thymus”, J Virol 66(3):1635-40
[0179] 22. Judge et al. (2006) “Design of noninflammatory synthetic siRNA mediating potent gene silencing in vivo”, Mol Ther. 13(3):494-505
[0180] 23. Kohn et al. (1995) “Engraftment of gene-modified umbilical cord blood cells in neonates with adnosine deaminase deficiency”, Nature Medicine 1:1017-23
[0181] 24. Kremer and Perricaudet (1995) “Adenovirus and adeno-associated virus mediated gene transfer”, Br. Med. Bull. 51(1):31-44
[0182] 25. Macdiarmid et al. (2009) “Sequential treatment of drug-resistant tumors with targeted minicells containing siRNA or a cytotoxic drug”, Nat Biotehcnol. 27(7):643-51
[0183] 26. Malech et al. (1997) “Prolonged production of NADPH oxidase-corrected granulocyes after gene therapy of chronic granulomatous disease”, PNAS 94(22):12133-38
[0184] 27. Miller et al. (1991) “Construction and properties of retrovirus packaging cells based on gibbon ape leukemia virus”, J Virol. 65(5):2220-24
[0185] 28. Miller (1992) “Human gene therapy comes of age”, Nature 357:455-60
[0186] 29. Mitani and Caskey (1993) “Delivering therapeutic genes — matching approach and application”, Trends in Biotechnology 11(5):162-66
[0187] 30. Nabel and Felgner (1993) “Direct gene transfer for immunotherapy and immunization”, Trends in Biotechnology 11(5):211-15
[0188] 31. Remy et al. (1994) “Gene Transfer with a Series of Lipphilic DNA-Binding Molecules”, Bioconjugate Chem. 5(6):647-54
[0189] 32. Sentmanat et al. (2018) “A Survey of Validation Strategies for CRISPR-Cas9 Editing”, Scientific Reports 8:888, doi:10.1038/s41598-018-19441-8
[0190] 33. Sommerfelt et al. (1990) “Localization of the receptor gene for type D simian retroviruses on human chromosome 19”, J. Virol. 64(12):6214-20
[0191] 34. Van Brunt (1988) “Molecular framing: transgenic animals as bioactors” Biotechnology 6:1149-54
[0192] 35. Vigne et al. (1995) “Third-generation adenovectors for gene therapy”, Restorative Neurology and Neuroscience 8(1,2): 35-36
[0193] 36. Wilson et al. (1989) “Formation of infectious hybrid virion with gibbon ape leukemia virus and human T-cell leukemia virus retroviral envelope glycoproteins and the gag and pol proteins of Moloney murine leukemia virus”, J. Virol. 63:2374-78
[0194] 37. Yu et al. (1994) “Progress towards gene therapy for HIV infection”, Gene Ther. 1(1):13-26
[0195] 38. Zetsche et al. (2015) “Cpf1 is a single RNA-guided endonuclease of a class 2 CRIPSR-Cas system” Cell 163(3):759-71
[0196] 39. Zuris et al. (2015) “Cationic lipid-mediated delivery of proteins enables efficient protein based genome editing in vitro and in vivo” Nat Biotechnol. 33(1):73-80

1-40. (canceled)

41. A method for inactivating a single mutant Rhodopsin (Rho) allele in a human cell, the method comprising delivering a composition comprising
a) an RNA molecule comprising a guide sequence portion consisting of 17-24 nucleotides and targeting a sequence linked to SNP ID No. rs7984 based on the National Center for Biotechnology Information Database of Single Nucleotide Polymorphisms (dbSNP); and
b) a CRISPR nuclease
to a human cell that has a mutant Rho allele and a functional Rho allele,
such that the mutant Rho allele is inactivated.

42. The method of claim 41, wherein the RNA molecule further comprises a portion having a sequence which binds to the CRISPR nuclease.

43. The method of claim 41, wherein the RNA molecule further comprises one or more linker portions.

44. The method of claim 41, wherein the RNA molecule is up to 300 nucleotides in length.

45. The method of claim 41, wherein the composition further comprises a second RNA molecule comprising a guide sequence portion that targets a SNP in an untranslated region (UTR) of the mutant Rho allele.

46. The method of claim 45, wherein the guide sequence portion of the second RNA molecule consists of 17-24 nucleotides and targets a sequence linked to SNP ID No. rs2855558 based on the National Center for Biotechnology Information Database of Single Nucleotide Polymorphisms (dbSNP).

47. The method of claim 45, wherein the 17-24 nucleotides of the guide sequence portion of the second RNA molecule are in a different sequence from the sequence of the guide sequence portion of the first RNA molecule.

48. The method of claim 45, wherein the second RNA molecule targets a sequence present in both a mutant Rho allele and a functional Rho allele.

49. The method of claim 45, wherein the second RNA molecule targets an exon of the mutant Rho allele.

50. The method of claim 45, wherein a region of the mutant Rho allele between the first and second RNA molecules is excised.

51. The method of claim 41, wherein the composition further comprises a tracrRNA molecule.

52. The method of claim 41, comprising subjecting the mutant allele to insertion or deletion by an error prone non-homologous end joining (NHEJ) mechanism, generating a frameshift in the mutant Rho allele sequence.

53. The method of claim 52, wherein the frameshift results in inactivation or knockout of the mutant Rho allele.

54. The method of claim 52, wherein, the frameshift creates an early stop codon in the mutant Rho allele.

55. The method of claim 41, wherein the frameshift results in nonsense-mediated mRNA decay of the transcript of the mutant Rho allele.

56. The method of claim 41, wherein the inactivating results in a truncated protein encoded by the mutant Rho allele and a functional protein encoded by the functional allele.

57. The method of claim 41, wherein the guide sequence portion of the RNA molecule comprises nucleotides in the sequence of 17-20 contiguous nucleotides set forth in SEQ ID NO: 219.

58. The method of claim 41, wherein the guide sequence portion of the RNA molecule comprises nucleotides in the sequence of 17-20 contiguous nucleotides set forth in SEQ ID NO: 220.

59-60. (canceled)

61. A method for editing a mutant Rhodopsin (Rho) allele in a human cell, the method comprising delivering a composition comprising
a) an RNA molecule comprising a guide sequence portion consisting of 17-24 nucleotides and targeting a sequence in the mutant Rho allele linked to SNP ID No. rs7984 based on the National Center for Biotechnology Information Database of Single Nucleotide Polymorphisms (dbSNP); and
b) a CRISPR nuclease,
to a human cell that has a mutant Rho allele and a functional Rho allele,
such that the mutant Rho allele is edited.

The application's sequence listing, which the Patent Office published only in electronic form, follows.

SEQUENCE LISTING (3010 sequences)

SEQ ID NO: 1 - RNA, 20 nt, Artificial Sequence
  synthesized
ugggguuuuucccauuccca

SEQ ID NO: 2 - RNA, 20 nt, Artificial Sequence
  synthesized
uugggguuuuucccauuccc

SEQ ID NO: 3 - RNA, 20 nt, Artificial Sequence
  synthesized
acggugaaggccaaguuccc

SEQ ID NO: 4 - RNA, 20 nt, Artificial Sequence
  synthesized
aguucccaaugagggugaga

SEQ ID NO: 5 - RNA, 20 nt, Artificial Sequence
  synthesized
guucccaaugagggugagau

SEQ ID NO: 6 - RNA, 20 nt, Artificial Sequence
  synthesized
aaucucacccucauugggaa

SEQ ID NO: 7 - RNA, 20 nt, Artificial Sequence
  synthesized
aaugagggugagauugggcc

SEQ ID NO: 8 - RNA, 20 nt, Artificial Sequence
  synthesized
aggcccaaucucacccucau

SEQ ID NO: 9 - RNA, 20 nt, Artificial Sequence
  synthesized
augagggugagauugggccu

SEQ ID NO: 10 - RNA, 20 nt, Artificial Sequence
  synthesized
gcccaaucucacccucauug

SEQ ID NO: 11 - RNA, 20 nt, Artificial Sequence
  synthesized
ggcccaaucucacccucauu

SEQ ID NO: 12 - RNA, 20 nt, Artificial Sequence
  synthesized
uucccaaugagggugagauu

SEQ ID NO: 13 - RNA, 20 nt, Artificial Sequence
  synthesized
cugagcaaacugaggcccag

SEQ ID NO: 14 - RNA, 20 nt, Artificial Sequence
  synthesized
gucugagcaaacugaggccc

SEQ ID NO: 15 - RNA, 20 nt, Artificial Sequence
  synthesized
ucugagcaaacugaggccca

SEQ ID NO: 16 - RNA, 20 nt, Artificial Sequence
  synthesized
cccaucccauucccgacuug

SEQ ID NO: 17 - RNA, 20 nt, Artificial Sequence
  synthesized
gcccaaugucaaagucagaa

SEQ ID NO: 18 - RNA, 20 nt, Artificial Sequence
  synthesized
auucuugggugggagcagcc

SEQ ID NO: 19 - RNA, 20 nt, Artificial Sequence
  synthesized
cauucuugggugggagcagc

SEQ ID NO: 20 - RNA, 20 nt, Artificial Sequence
  synthesized
uggcccuuguggcugacccg

SEQ ID NO: 21 - RNA, 20 nt, Artificial Sequence
  synthesized
uguggcccuuguggcugacc

SEQ ID NO: 22 - RNA, 20 nt, Artificial Sequence
  synthesized
cuaaucagccacgagggccu

SEQ ID NO: 23 - RNA, 20 nt, Artificial Sequence
  synthesized
gccaccugguacauggcauu

SEQ ID NO: 24 - RNA, 20 nt, Artificial Sequence
  synthesized
auaucccuuaaucucucucu

SEQ ID NO: 25 - RNA, 20 nt, Artificial Sequence
  synthesized
auccugggugggaagagaga

SEQ ID NO: 26 - RNA, 20 nt, Artificial Sequence
  synthesized
uccugggugggaagagagac

SEQ ID NO: 27 - RNA, 20 nt, Artificial Sequence
  synthesized
cccugucuccacaaccucac

SEQ ID NO: 28 - RNA, 20 nt, Artificial Sequence
  synthesized
gaagcagauuccguccaggg

SEQ ID NO: 29 - RNA, 20 nt, Artificial Sequence
  synthesized
acguggcagggcuaaggcag

SEQ ID NO: 30 - RNA, 20 nt, Artificial Sequence
  synthesized
guggcagggcuaaggcaggg

SEQ ID NO: 31 - RNA, 20 nt, Artificial Sequence
  synthesized
aucuggagucccacguuccc

SEQ ID NO: 32 - RNA, 20 nt, Artificial Sequence
  synthesized
ggcacacaucccgcuggccu

SEQ ID NO: 33 - RNA, 20 nt, Artificial Sequence
  synthesized
acuaggggugagaccccagg

SEQ ID NO: 34 - RNA, 20 nt, Artificial Sequence
  synthesized
uaggggugagaccccaggcc

SEQ ID NO: 35 - RNA, 20 nt, Artificial Sequence
  synthesized
guggccauauuguggccccu

SEQ ID NO: 36 - RNA, 20 nt, Artificial Sequence
  synthesized
uggccauauuguggccccuu

SEQ ID NO: 37 - RNA, 20 nt, Artificial Sequence
  synthesized
ccccuuggaacuggguccca

SEQ ID NO: 38 - RNA, 20 nt, Artificial Sequence
  synthesized
cugagugggacccaguucca

SEQ ID NO: 39 - RNA, 20 nt, Artificial Sequence
  synthesized
gagugggacccaguuccaag

SEQ ID NO: 40 - RNA, 20 nt, Artificial Sequence
  synthesized
ugagugggacccaguuccaa

SEQ ID NO: 41 - RNA, 20 nt, Artificial Sequence
  synthesized
cgauugucuccuaauggggc

SEQ ID NO: 42 - RNA, 20 nt, Artificial Sequence
  synthesized
cuguccccacugugucucau

SEQ ID NO: 43 - RNA, 20 nt, Artificial Sequence
  synthesized
aagcacuaugcaaaaagcaa

SEQ ID NO: 44 - RNA, 20 nt, Artificial Sequence
  synthesized
gaagcacuaugcaaaaagca

SEQ ID NO: 45 - RNA, 20 nt, Artificial Sequence
  synthesized
augcugagguacugcuaagc

SEQ ID NO: 46 - RNA, 20 nt, Artificial Sequence
  synthesized
guaccucagcaucuugcuuu

SEQ ID NO: 47 - RNA, 20 nt, Artificial Sequence
  synthesized
cuagggcuaugccacgcaga

SEQ ID NO: 48 - RNA, 20 nt, Artificial Sequence
  synthesized
gcuagggcuaugccacgcag

SEQ ID NO: 49 - RNA, 20 nt, Artificial Sequence
  synthesized
gucuucaccgucaaggaggu

SEQ ID NO: 50 - RNA, 20 nt, Artificial Sequence
  synthesized
ucuucaccgucaaggaggua

SEQ ID NO: 51 - RNA, 20 nt, Artificial Sequence
  synthesized
guggcugggggaagguguag

SEQ ID NO: 52 - RNA, 20 nt, Artificial Sequence
  synthesized
uggcugggggaagguguagg

SEQ ID NO: 53 - RNA, 20 nt, Artificial Sequence
  synthesized
uguggcugggggaaggugua

SEQ ID NO: 54 - RNA, 20 nt, Artificial Sequence
  synthesized
guuggaagcccgcaucuauc

SEQ ID NO: 55 - RNA, 20 nt, Artificial Sequence
  synthesized
uuggaagcccgcaucuaucu

SEQ ID NO: 56 - RNA, 20 nt, Artificial Sequence
  synthesized
uuggugcugcaaacauggcc

SEQ ID NO: 57 - RNA, 20 nt, Artificial Sequence
  synthesized
aguggcugagcucaggccuu

SEQ ID NO: 58 - RNA, 20 nt, Artificial Sequence
  synthesized
cugcucccacccaagaaugc

SEQ ID NO: 59 - RNA, 20 nt, Artificial Sequence
  synthesized
gcucccacccaagaaugcug

SEQ ID NO: 60 - RNA, 20 nt, Artificial Sequence
  synthesized
acagccaucacugaggugac

SEQ ID NO: 61 - RNA, 20 nt, Artificial Sequence
  synthesized
ggagacaaucgccuagaggc

SEQ ID NO: 62 - RNA, 20 nt, Artificial Sequence
  synthesized
acugugggcagcccuggccc

SEQ ID NO: 63 - RNA, 20 nt, Artificial Sequence
  synthesized
ggaaggcaagaggcuugagu

SEQ ID NO: 64 - RNA, 20 nt, Artificial Sequence
  synthesized
aaacacccaacaauggccag

SEQ ID NO: 65 - RNA, 20 nt, Artificial Sequence
  synthesized
aacaaacacccaacaauggc

SEQ ID NO: 66 - RNA, 20 nt, Artificial Sequence
  synthesized
acaaacacccaacaauggcc

SEQ ID NO: 67 - RNA, 20 nt, Artificial Sequence
  synthesized
ggucccauucucagggaauc

SEQ ID NO: 68 - RNA, 20 nt, Artificial Sequence
  synthesized
acgggugguuguucucugca

SEQ ID NO: 69 - RNA, 20 nt, Artificial Sequence
  synthesized
uacgggugguuguucucugc

SEQ ID NO: 70 - RNA, 20 nt, Artificial Sequence
  synthesized
uuacgggugguuguucucug

SEQ ID NO: 71 - RNA, 20 nt, Artificial Sequence
  synthesized
cccaucccacacagcuuagc

SEQ ID NO: 72 - RNA, 20 nt, Artificial Sequence
  synthesized
ccccaucccacacagcuuag

SEQ ID NO: 73 - RNA, 20 nt, Artificial Sequence
  synthesized
acauuagagucuguuucuuc

SEQ ID NO: 74 - RNA, 20 nt, Artificial Sequence
  synthesized
cacucaggguagggguguag

SEQ ID NO: 75 - RNA, 20 nt, Artificial Sequence
  synthesized
cucaggguagggguguaggg

SEQ ID NO: 76 - RNA, 20 nt, Artificial Sequence
  synthesized
ucaggguagggguguagggc

SEQ ID NO: 77 - RNA, 20 nt, Artificial Sequence
  synthesized
agacacuuaucccuaagcug

SEQ ID NO: 78 - RNA, 20 nt, Artificial Sequence
  synthesized
cuagacacuuaucccuaagc

SEQ ID NO: 79 - RNA, 20 nt, Artificial Sequence
  synthesized
uagacacuuaucccuaagcu

SEQ ID NO: 80 - RNA, 20 nt, Artificial Sequence
  synthesized
agcagagccgcuggacgcuc

SEQ ID NO: 81 - RNA, 20 nt, Artificial Sequence
  synthesized
gcagagccgcuggacgcucu

SEQ ID NO: 82 - RNA, 20 nt, Artificial Sequence
  synthesized
cucugggcccauaagggaca

SEQ ID NO: 83 - RNA, 20 nt, Artificial Sequence
  synthesized
gcucugggcccauaagggac

SEQ ID NO: 84 - RNA, 20 nt, Artificial Sequence
  synthesized
ucugggcccauaagggacac

SEQ ID NO: 85 - RNA, 20 nt, Artificial Sequence
  synthesized
agcccucauauauucaguca

SEQ ID NO: 86 - RNA, 20 nt, Artificial Sequence
  synthesized
aggaugcauucuucugcuaa

SEQ ID NO: 87 - RNA, 20 nt, Artificial Sequence
  synthesized
cauuaggaugcauucuucug

SEQ ID NO: 88 - RNA, 20 nt, Artificial Sequence
  synthesized
cauucuucugcuaaacacac

SEQ ID NO: 89 - RNA, 20 nt, Artificial Sequence
  synthesized
cuaaacacacacacacacac

SEQ ID NO: 90 - RNA, 20 nt, Artificial Sequence
  synthesized
cuucugcuaaacacacacac

SEQ ID NO: 91 - RNA, 20 nt, Artificial Sequence
  synthesized
gaugcauucuucugcuaaac

SEQ ID NO: 92 - RNA, 20 nt, Artificial Sequence
  synthesized
guguguguguguuuagcaga

SEQ ID NO: 93 - RNA, 20 nt, Artificial Sequence
  synthesized
guguguguuuagcagaagaa

SEQ ID NO: 94 - RNA, 20 nt, Artificial Sequence
  synthesized
guguguuuagcagaagaaug

SEQ ID NO: 95 - RNA, 20 nt, Artificial Sequence
  synthesized
ucugcuaaacacacacacac

SEQ ID NO: 96 - RNA, 20 nt, Artificial Sequence
  synthesized
ugcauucuucugcuaaacac

SEQ ID NO: 97 - RNA, 20 nt, Artificial Sequence
  synthesized
uguguguguguguguuuagc

SEQ ID NO: 98 - RNA, 20 nt, Artificial Sequence
  synthesized
uguguguguuuagcagaaga

SEQ ID NO: 99 - RNA, 20 nt, Artificial Sequence
  synthesized
uuaggaugcauucuucugcu

SEQ ID NO: 100 - RNA, 20 nt, Artificial Sequence
  synthesized
uucuucugcuaaacacacac

SEQ ID NO: 101 - RNA, 20 nt, Artificial Sequence
  synthesized
agagguggaggaggcagucc

SEQ ID NO: 102 - RNA, 20 nt, Artificial Sequence
  synthesized
aggaggcaguccugggaaug

SEQ ID NO: 103 - RNA, 20 nt, Artificial Sequence
  synthesized
agguggaggaggcaguccug

SEQ ID NO: 104 - RNA, 20 nt, Artificial Sequence
  synthesized
ccaggacugccuccuccacc

SEQ ID NO: 105 - RNA, 20 nt, Artificial Sequence
  synthesized
cccauucccaggacugccuc

SEQ ID NO: 106 - RNA, 20 nt, Artificial Sequence
  synthesized
gaggaggcaguccugggaau

SEQ ID NO: 107 - RNA, 20 nt, Artificial Sequence
  synthesized
gaggcaguccugggaauggg

SEQ ID NO: 108 - RNA, 20 nt, Artificial Sequence
  synthesized
gagguggaggaggcaguccu

SEQ ID NO: 109 - RNA, 20 nt, Artificial Sequence
  synthesized
ggaggaggcaguccugggaa

SEQ ID NO: 110 - RNA, 20 nt, Artificial Sequence
  synthesized
cuggggcuagagguggagga

SEQ ID NO: 111 - RNA, 20 nt, Artificial Sequence
  synthesized
agaaagugaggcccagggag

SEQ ID NO: 112 - RNA, 20 nt, Artificial Sequence
  synthesized
cacucuucugagcagacaga

SEQ ID NO: 113 - RNA, 20 nt, Artificial Sequence
  synthesized
ucucuucccacccaggauuc

SEQ ID NO: 114 - RNA, 20 nt, Artificial Sequence
  synthesized
ucuucccacccaggauuccc

SEQ ID NO: 115 - RNA, 20 nt, Artificial Sequence
  synthesized
cugggcacugagggagagcu

SEQ ID NO: 116 - RNA, 20 nt, Artificial Sequence
  synthesized
gcugggcacugagggagagc

SEQ ID NO: 117 - RNA, 20 nt, Artificial Sequence
  synthesized
ggcugggcacugagggagag

SEQ ID NO: 118 - RNA, 20 nt, Artificial Sequence
  synthesized
aaggccaaguucccaaugag

SEQ ID NO: 119 - RNA, 20 nt, Artificial Sequence
  synthesized
aaggccaaguucccagugag

SEQ ID NO: 120 - RNA, 20 nt, Artificial Sequence
  synthesized
aaucucacccucacugggaa

SEQ ID NO: 121 - RNA, 20 nt, Artificial Sequence
  synthesized
acccucacugggaacuuggc

SEQ ID NO: 122 - RNA, 20 nt, Artificial Sequence
  synthesized
acccucauugggaacuuggc

SEQ ID NO: 123 - RNA, 20 nt, Artificial Sequence
  synthesized
aggccaaguucccaaugagg

SEQ ID NO: 124 - RNA, 20 nt, Artificial Sequence
  synthesized
aggccaaguucccagugagg

SEQ ID NO: 125 - RNA, 20 nt, Artificial Sequence
  synthesized
aggcccaaucucacccucac

SEQ ID NO: 126 - RNA, 20 nt, Artificial Sequence
  synthesized
agugagggugagauugggcc

SEQ ID NO: 127 - RNA, 20 nt, Artificial Sequence
  synthesized
aguucccagugagggugaga

SEQ ID NO: 128 - RNA, 20 nt, Artificial Sequence
  synthesized
ccaaguucccaaugagggug

SEQ ID NO: 129 - RNA, 20 nt, Artificial Sequence
  synthesized
ccaaguucccagugagggug

SEQ ID NO: 130 - RNA, 20 nt, Artificial Sequence
  synthesized
cucacugggaacuuggccuu

SEQ ID NO: 131 - RNA, 20 nt, Artificial Sequence
  synthesized
cucauugggaacuuggccuu

SEQ ID NO: 132 - RNA, 20 nt, Artificial Sequence
  synthesized
gaaggccaaguucccaauga

SEQ ID NO: 133 - RNA, 20 nt, Artificial Sequence
  synthesized
gaaggccaaguucccaguga

SEQ ID NO: 134 - RNA, 20 nt, Artificial Sequence
  synthesized
gcccaaucucacccucacug

SEQ ID NO: 135 - RNA, 20 nt, Artificial Sequence
  synthesized
ggccaaguucccaaugaggg

SEQ ID NO: 136 - RNA, 20 nt, Artificial Sequence
  synthesized
ggccaaguucccagugaggg

SEQ ID NO: 137 - RNA, 20 nt, Artificial Sequence
  synthesized
ggcccaaucucacccucacu

SEQ ID NO: 138 - RNA, 20 nt, Artificial Sequence
  synthesized
ggugaaggccaaguucccaa

SEQ ID NO: 139 - RNA, 20 nt, Artificial Sequence
  synthesized
ggugaaggccaaguucccag

SEQ ID NO: 140 - RNA, 20 nt, Artificial Sequence
  synthesized
gugagggugagauugggccu

SEQ ID NO: 141 - RNA, 20 nt, Artificial Sequence
  synthesized
guucccagugagggugagau

SEQ ID NO: 142 - RNA, 20 nt, Artificial Sequence
  synthesized
ucucacccucacugggaacu

SEQ ID NO: 143 - RNA, 20 nt, Artificial Sequence
  synthesized
ucucacccucauugggaacu

SEQ ID NO: 144 - RNA, 20 nt, Artificial Sequence
  synthesized
ugaaggccaaguucccaaug

SEQ ID NO: 145 - RNA, 20 nt, Artificial Sequence
  synthesized
ugaaggccaaguucccagug

SEQ ID NO: 146 - RNA, 20 nt, Artificial Sequence
  synthesized
uucccagugagggugagauu

SEQ ID NO: 147 - RNA, 20 nt, Artificial Sequence
  synthesized
acugaggcccagggagggga

SEQ ID NO: 148 - RNA, 20 nt, Artificial Sequence
  synthesized
agcaaacugaggcccaggga

SEQ ID NO: 149 - RNA, 20 nt, Artificial Sequence
  synthesized
caaacugaggcccagggagg

SEQ ID NO: 150 - RNA, 20 nt, Artificial Sequence
  synthesized
ccagagaggggaaggaagca

SEQ ID NO: 151 - RNA, 20 nt, Artificial Sequence
  synthesized
ccagggaggggaaggaagca

SEQ ID NO: 152 - RNA, 20 nt, Artificial Sequence
  synthesized
cccagagaggggaaggaagc

SEQ ID NO: 153 - RNA, 20 nt, Artificial Sequence
  synthesized
cccagggaggggaaggaagc

SEQ ID NO: 154 - RNA, 20 nt, Artificial Sequence
  synthesized
cccugggccucaguuugcuc

SEQ ID NO: 155 - RNA, 20 nt, Artificial Sequence
  synthesized
ccugcuuccuuccccucccu

SEQ ID NO: 156 - RNA, 20 nt, Artificial Sequence
  synthesized
ccugcuuccuuccccucucu

SEQ ID NO: 157 - RNA, 20 nt, Artificial Sequence
  synthesized
cucugggccucaguuugcuc

SEQ ID NO: 158 - RNA, 20 nt, Artificial Sequence
  synthesized
gagcaaacugaggcccaggg

SEQ ID NO: 159 - RNA, 20 nt, Artificial Sequence
  synthesized
gcaaacugaggcccagggag

SEQ ID NO: 160 - RNA, 20 nt, Artificial Sequence
  synthesized
guccugcuuccuuccccucc

SEQ ID NO: 161 - RNA, 20 nt, Artificial Sequence
  synthesized
guccugcuuccuuccccucu

SEQ ID NO: 162 - RNA, 20 nt, Artificial Sequence
  synthesized
uccugcuuccuuccccuccc

SEQ ID NO: 163 - RNA, 20 nt, Artificial Sequence
  synthesized
uccugcuuccuuccccucuc

SEQ ID NO: 164 - RNA, 20 nt, Artificial Sequence
  synthesized
aaagucagaaggacccaagu

SEQ ID NO: 165 - RNA, 20 nt, Artificial Sequence
  synthesized
aaagucagaaggucccaagu

SEQ ID NO: 166 - RNA, 20 nt, Artificial Sequence
  synthesized
aaggacccaagucgggaaug

SEQ ID NO: 167 - RNA, 20 nt, Artificial Sequence
  synthesized
aaggucccaagucgggaaug

SEQ ID NO: 168 - RNA, 20 nt, Artificial Sequence
  synthesized
aagucagaaggacccaaguc

SEQ ID NO: 169 - RNA, 20 nt, Artificial Sequence
  synthesized
aagucagaaggucccaaguc

SEQ ID NO: 170 - RNA, 20 nt, Artificial Sequence
  synthesized
aaugucaaagucagaaggac

SEQ ID NO: 171 - RNA, 20 nt, Artificial Sequence
  synthesized
aaugucaaagucagaagguc

SEQ ID NO: 172 - RNA, 20 nt, Artificial Sequence
  synthesized
acccaagucgggaaugggau

SEQ ID NO: 173 - RNA, 20 nt, Artificial Sequence
  synthesized
agaaggacccaagucgggaa

SEQ ID NO: 174 - RNA, 20 nt, Artificial Sequence
  synthesized
agaaggucccaagucgggaa

SEQ ID NO: 175 - RNA, 20 nt, Artificial Sequence
  synthesized
agucagaaggacccaagucg

SEQ ID NO: 176 - RNA, 20 nt, Artificial Sequence
  synthesized
agucagaaggucccaagucg

SEQ ID NO: 177 - RNA, 20 nt, Artificial Sequence
  synthesized
auucccgacuugggaccuuc

SEQ ID NO: 178 - RNA, 20 nt, Artificial Sequence
  synthesized
auucccgacuuggguccuuc

SEQ ID NO: 179 - RNA, 20 nt, Artificial Sequence
  synthesized
ccgacuugggaccuucugac

SEQ ID NO: 180 - RNA, 20 nt, Artificial Sequence
  synthesized
ccgacuuggguccuucugac

SEQ ID NO: 181 - RNA, 20 nt, Artificial Sequence
  synthesized
gaaggacccaagucgggaau

SEQ ID NO: 182 - RNA, 20 nt, Artificial Sequence
  synthesized
gaaggucccaagucgggaau

SEQ ID NO: 183 - RNA, 20 nt, Artificial Sequence
  synthesized
gacccaagucgggaauggga

SEQ ID NO: 184 - RNA, 20 nt, Artificial Sequence
  synthesized
gaccuucugacuuugacauu

SEQ ID NO: 185 - RNA, 20 nt, Artificial Sequence
  synthesized
gacuugggaccuucugacuu

SEQ ID NO: 186 - RNA, 20 nt, Artificial Sequence
  synthesized
gacuuggguccuucugacuu

SEQ ID NO: 187 - RNA, 20 nt, Artificial Sequence
  synthesized
ggacccaagucgggaauggg

SEQ ID NO: 188 - RNA, 20 nt, Artificial Sequence
  synthesized
ggaccuucugacuuugacau

SEQ ID NO: 189 - RNA, 20 nt, Artificial Sequence
  synthesized
ggucccaagucgggaauggg

SEQ ID NO: 190 - RNA, 20 nt, Artificial Sequence
  synthesized
gguccuucugacuuugacau

SEQ ID NO: 191 - RNA, 20 nt, Artificial Sequence
  synthesized
gucccaagucgggaauggga

SEQ ID NO: 192 - RNA, 20 nt, Artificial Sequence
  synthesized
guccuucugacuuugacauu

SEQ ID NO: 193 - RNA, 20 nt, Artificial Sequence
  synthesized
ucccaagucgggaaugggau

SEQ ID NO: 194 - RNA, 20 nt, Artificial Sequence
  synthesized
cagguuggagugcaguggca

SEQ ID NO: 195 - RNA, 20 nt, Artificial Sequence
  synthesized
caugccacugcacuccaacc

SEQ ID NO: 196 - RNA, 20 nt, Artificial Sequence
  synthesized
cucagguuggagugcagugg

SEQ ID NO: 197 - RNA, 20 nt, Artificial Sequence
  synthesized
ggagugcaguggcaugauca

SEQ ID NO: 198 - RNA, 20 nt, Artificial Sequence
  synthesized
guggcaugaucauggcucac

SEQ ID NO: 199 - RNA, 20 nt, Artificial Sequence
  synthesized
ucaugccacugcacuccaac

SEQ ID NO: 200 - RNA, 20 nt, Artificial Sequence
  synthesized
ugccacugcacuccaaccug

SEQ ID NO: 201 - RNA, 20 nt, Artificial Sequence
  synthesized
agcagccacgggucagccac

SEQ ID NO: 202 - RNA, 20 nt, Artificial Sequence
  synthesized
agcagccgcgggucagccac

SEQ ID NO: 203 - RNA, 20 nt, Artificial Sequence
  synthesized
agccacgggucagccacaag

SEQ ID NO: 204 - RNA, 20 nt, Artificial Sequence
  synthesized
agccgcgggucagccacaag

SEQ ID NO: 205 - RNA, 20 nt, Artificial Sequence
  synthesized
cacgggucagccacaagggc

SEQ ID NO: 206 - RNA, 20 nt, Artificial Sequence
  synthesized
cagccacgggucagccacaa

SEQ ID NO: 207 - RNA, 20 nt, Artificial Sequence
  synthesized
cagccgcgggucagccacaa

SEQ ID NO: 208 - RNA, 20 nt, Artificial Sequence
  synthesized
cccgcggcugcucccaccca

SEQ ID NO: 209 - RNA, 20 nt, Artificial Sequence
  synthesized
cccguggcugcucccaccca

SEQ ID NO: 210 - RNA, 20 nt, Artificial Sequence
  synthesized
cgcgggucagccacaagggc

SEQ ID NO: 211 - RNA, 20 nt, Artificial Sequence
  synthesized
gcagccacgggucagccaca

SEQ ID NO: 212 - RNA, 20 nt, Artificial Sequence
  synthesized
gcagccgcgggucagccaca

SEQ ID NO: 213 - RNA, 20 nt, Artificial Sequence
  synthesized
ggugggagcagccacggguc

SEQ ID NO: 214 - RNA, 20 nt, Artificial Sequence
  synthesized
ggugggagcagccgcggguc

SEQ ID NO: 215 - RNA, 20 nt, Artificial Sequence
  synthesized
ucuugggugggagcagccac

SEQ ID NO: 216 - RNA, 20 nt, Artificial Sequence
  synthesized
ucuugggugggagcagccgc

SEQ ID NO: 217 - RNA, 20 nt, Artificial Sequence
  synthesized
uguggcugacccgcggcugc

SEQ ID NO: 218 - RNA, 20 nt, Artificial Sequence
  synthesized
uguggcugacccguggcugc

SEQ ID NO: 219 - RNA, 20 nt, Artificial Sequence
  synthesized
uucuugggugggagcagcca

SEQ ID NO: 220 - RNA, 20 nt, Artificial Sequence
  synthesized
uucuugggugggagcagccg

SEQ ID NO: 221 - RNA, 20 nt, Artificial Sequence
  synthesized
uugggugggagcagccacgg

SEQ ID NO: 222 - RNA, 20 nt, Artificial Sequence
  synthesized
uugggugggagcagccgcgg

SEQ ID NO: 223 - RNA, 20 nt, Artificial Sequence
  synthesized
auggcauucgaggcccucgu

SEQ ID NO: 224 - RNA, 20 nt, Artificial Sequence
  synthesized
auggcauuugaggcccucgu

SEQ ID NO: 225 - RNA, 20 nt, Artificial Sequence
  synthesized
caccugguacauggcauucg

SEQ ID NO: 226 - RNA, 20 nt, Artificial Sequence
  synthesized
caccugguacauggcauuug

SEQ ID NO: 227 - RNA, 20 nt, Artificial Sequence
  synthesized
cauggcauucgaggcccucg

SEQ ID NO: 228 - RNA, 20 nt, Artificial Sequence
  synthesized
cauggcauuugaggcccucg

SEQ ID NO: 229 - RNA, 20 nt, Artificial Sequence
  synthesized
cgaggcccucguggcugauu

SEQ ID NO: 230 - RNA, 20 nt, Artificial Sequence
  synthesized
cucaaaugccauguaccagg

SEQ ID NO: 231 - RNA, 20 nt, Artificial Sequence
  synthesized
cucgaaugccauguaccagg

SEQ ID NO: 232 - RNA, 20 nt, Artificial Sequence
  synthesized
gcauucgaggcccucguggc

SEQ ID NO: 233 - RNA, 20 nt, Artificial Sequence
  synthesized
gcauuugaggcccucguggc

SEQ ID NO: 234 - RNA, 20 nt, Artificial Sequence
  synthesized
gccucaaaugccauguacca

SEQ ID NO: 235 - RNA, 20 nt, Artificial Sequence
  synthesized
gccucgaaugccauguacca

SEQ ID NO: 236 - RNA, 20 nt, Artificial Sequence
  synthesized
ggccucaaaugccauguacc

SEQ ID NO: 237 - RNA, 20 nt, Artificial Sequence
  synthesized
ggccucgaaugccauguacc

SEQ ID NO: 238 - RNA, 20 nt, Artificial Sequence
  synthesized
uacauggcauucgaggcccu

SEQ ID NO: 239 - RNA, 20 nt, Artificial Sequence
  synthesized
uacauggcauuugaggcccu

SEQ ID NO: 240 - RNA, 20 nt, Artificial Sequence
  synthesized
ugaggcccucguggcugauu

SEQ ID NO: 241 - RNA, 20 nt, Artificial Sequence
  synthesized
uucgaggcccucguggcuga

SEQ ID NO: 242 - RNA, 20 nt, Artificial Sequence
  synthesized
uuugaggcccucguggcuga

SEQ ID NO: 243 - RNA, 20 nt, Artificial Sequence
  synthesized
acagugagagagagauuaag

SEQ ID NO: 244 - RNA, 20 nt, Artificial Sequence
  synthesized
accgucucucuucccaccca

SEQ ID NO: 245 - RNA, 20 nt, Artificial Sequence
  synthesized
acggugagagagagauuaag

SEQ ID NO: 246 - RNA, 20 nt, Artificial Sequence
  synthesized
acugucucucuucccaccca

SEQ ID NO: 247 - RNA, 20 nt, Artificial Sequence
  synthesized
agacagugagagagagauua

SEQ ID NO: 248 - RNA, 20 nt, Artificial Sequence
  synthesized
agacggugagagagagauua

SEQ ID NO: 249 - RNA, 20 nt, Artificial Sequence
  synthesized
caccgucucucuucccaccc

SEQ ID NO: 250 - RNA, 20 nt, Artificial Sequence
  synthesized
cacugucucucuucccaccc

SEQ ID NO: 251 - RNA, 20 nt, Artificial Sequence
  synthesized
cucaccgucucucuucccac

SEQ ID NO: 252 - RNA, 20 nt, Artificial Sequence
  synthesized
cucacugucucucuucccac

SEQ ID NO: 253 - RNA, 20 nt, Artificial Sequence
  synthesized
cucucucucaccgucucucu

SEQ ID NO: 254 - RNA, 20 nt, Artificial Sequence
  synthesized
cucucucucacugucucucu

SEQ ID NO: 255 - RNA, 20 nt, Artificial Sequence
  synthesized
cugggugggaagagagacag

SEQ ID NO: 256 - RNA, 20 nt, Artificial Sequence
  synthesized
cugggugggaagagagacgg

SEQ ID NO: 257 - RNA, 20 nt, Artificial Sequence
  synthesized
gaagagagacagugagagag

SEQ ID NO: 258 - RNA, 20 nt, Artificial Sequence
  synthesized
gaagagagacggugagagag

SEQ ID NO: 259 - RNA, 20 nt, Artificial Sequence
  synthesized
gacagugagagagagauuaa

SEQ ID NO: 260 - RNA, 20 nt, Artificial Sequence
  synthesized
gacggugagagagagauuaa

SEQ ID NO: 261 - RNA, 20 nt, Artificial Sequence
  synthesized
gggaagagagacagugagag

SEQ ID NO: 262 - RNA, 20 nt, Artificial Sequence
  synthesized
gggaagagagacggugagag

SEQ ID NO: 263 - RNA, 20 nt, Artificial Sequence
  synthesized
gggugggaagagagacagug

SEQ ID NO: 264 - RNA, 20 nt, Artificial Sequence
  synthesized
gggugggaagagagacggug

SEQ ID NO: 265 - RNA, 20 nt, Artificial Sequence
  synthesized
gugggaagagagacagugag

SEQ ID NO: 266 - RNA, 20 nt, Artificial Sequence
  synthesized
gugggaagagagacggugag

SEQ ID NO: 267 - RNA, 20 nt, Artificial Sequence
  synthesized
ugggaagagagacagugaga

SEQ ID NO: 268 - RNA, 20 nt, Artificial Sequence
  synthesized
ugggaagagagacggugaga

SEQ ID NO: 269 - RNA, 20 nt, Artificial Sequence
  synthesized
aaccucacagacacccugga

SEQ ID NO: 270 - RNA, 20 nt, Artificial Sequence
  synthesized
aaccucacagccacccugga

SEQ ID NO: 271 - RNA, 20 nt, Artificial Sequence
  synthesized
accucacagacacccuggac

SEQ ID NO: 272 - RNA, 20 nt, Artificial Sequence
  synthesized
accucacagccacccuggac

SEQ ID NO: 273 - RNA, 20 nt, Artificial Sequence
  synthesized
cacaaccucacagacacccu

SEQ ID NO: 274 - RNA, 20 nt, Artificial Sequence
  synthesized
cacaaccucacagccacccu

SEQ ID NO: 275 - RNA, 20 nt, Artificial Sequence
  synthesized
cagauuccguccaggguggc

SEQ ID NO: 276 - RNA, 20 nt, Artificial Sequence
  synthesized
cagauuccguccaggguguc

SEQ ID NO: 277 - RNA, 20 nt, Artificial Sequence
  synthesized
caggguggcugugagguugu

SEQ ID NO: 278 - RNA, 20 nt, Artificial Sequence
  synthesized
cagggugucugugagguugu

SEQ ID NO: 279 - RNA, 20 nt, Artificial Sequence
  synthesized
ccacaaccucacagacaccc

SEQ ID NO: 280 - RNA, 20 nt, Artificial Sequence
  synthesized
ccacaaccucacagccaccc

SEQ ID NO: 281 - RNA, 20 nt, Artificial Sequence
  synthesized
ccaggguggcugugagguug

SEQ ID NO: 282 - RNA, 20 nt, Artificial Sequence
  synthesized
ccagggugucugugagguug

SEQ ID NO: 283 - RNA, 20 nt, Artificial Sequence
  synthesized
gauuccguccaggguggcug

SEQ ID NO: 284 - RNA, 20 nt, Artificial Sequence
  synthesized
gauuccguccagggugucug

SEQ ID NO: 285 - RNA, 20 nt, Artificial Sequence
  synthesized
gcugugagguuguggagaca

SEQ ID NO: 286 - RNA, 20 nt, Artificial Sequence
  synthesized
ggcugugagguuguggagac

SEQ ID NO: 287 - RNA, 20 nt, Artificial Sequence
  synthesized
ggguggcugugagguugugg

SEQ ID NO: 288 - RNA, 20 nt, Artificial Sequence
  synthesized
gggugucugugagguugugg

SEQ ID NO: 289 - RNA, 20 nt, Artificial Sequence
  synthesized
guccaggguggcugugaggu

SEQ ID NO: 290 - RNA, 20 nt, Artificial Sequence
  synthesized
guccagggugucugugaggu

SEQ ID NO: 291 - RNA, 20 nt, Artificial Sequence
  synthesized
gucugugagguuguggagac

SEQ ID NO: 292 - RNA, 20 nt, Artificial Sequence
  synthesized
ucugugagguuguggagaca

SEQ ID NO: 293 - RNA, 20 nt, Artificial Sequence
  synthesized
uggcugugagguuguggaga

SEQ ID NO: 294 - RNA, 20 nt, Artificial Sequence
  synthesized
ugucugugagguuguggaga

SEQ ID NO: 295 - RNA, 20 nt, Artificial Sequence
  synthesized
uuccguccaggguggcugug

SEQ ID NO: 296 - RNA, 20 nt, Artificial Sequence
  synthesized
uuccguccagggugucugug

SEQ ID NO: 297 - RNA, 20 nt, Artificial Sequence
  synthesized
aaggcagggcgggugggaug

SEQ ID NO: 298 - RNA, 20 nt, Artificial Sequence
  synthesized
aaggcagggugggugggaug

SEQ ID NO: 299 - RNA, 20 nt, Artificial Sequence
  synthesized
acccugccuuagcccugcca

SEQ ID NO: 300 - RNA, 20 nt, Artificial Sequence
  synthesized
agggcgggugggauggggcc

SEQ ID NO: 301 - RNA, 20 nt, Artificial Sequence
  synthesized
agggcuaaggcagggcgggu

SEQ ID NO: 302 - RNA, 20 nt, Artificial Sequence
  synthesized
agggcuaaggcagggugggu

SEQ ID NO: 303 - RNA, 20 nt, Artificial Sequence
  synthesized
agggugggugggauggggcc

SEQ ID NO: 304 - RNA, 20 nt, Artificial Sequence
  synthesized
cagggcuaaggcagggcggg

SEQ ID NO: 305 - RNA, 20 nt, Artificial Sequence
  synthesized
cagggcuaaggcaggguggg

SEQ ID NO: 306 - RNA, 20 nt, Artificial Sequence
  synthesized
ccccaucccacccacccugc

SEQ ID NO: 307 - RNA, 20 nt, Artificial Sequence
  synthesized
ccccaucccacccgcccugc

SEQ ID NO: 308 - RNA, 20 nt, Artificial Sequence
  synthesized
cuaaggcagggcggguggga

SEQ ID NO: 309 - RNA, 20 nt, Artificial Sequence
  synthesized
cuaaggcaggguggguggga

SEQ ID NO: 310 - RNA, 20 nt, Artificial Sequence
  synthesized
gcccugccuuagcccugcca

SEQ ID NO: 311 - RNA, 20 nt, Artificial Sequence
  synthesized
ggcagggcuaaggcagggcg

SEQ ID NO: 312 - RNA, 20 nt, Artificial Sequence
  synthesized
ggcagggcuaaggcagggug

SEQ ID NO: 313 - RNA, 20 nt, Artificial Sequence
  synthesized
gggcuaaggcagggcgggug

SEQ ID NO: 314 - RNA, 20 nt, Artificial Sequence
  synthesized
gggcuaaggcagggugggug

SEQ ID NO: 315 - RNA, 20 nt, Artificial Sequence
  synthesized
uaaggcagggcgggugggau

SEQ ID NO: 316 - RNA, 20 nt, Artificial Sequence
  synthesized
uaaggcagggugggugggau

SEQ ID NO: 317 - RNA, 20 nt, Artificial Sequence
  synthesized
uggcagggcuaaggcagggc

SEQ ID NO: 318 - RNA, 20 nt, Artificial Sequence
  synthesized
uggcagggcuaaggcagggu

SEQ ID NO: 319 - RNA, 20 nt, Artificial Sequence
  synthesized
acacaucccgcuggccucgg

SEQ ID NO: 320 - RNA, 20 nt, Artificial Sequence
  synthesized
acacaucccgcuggccuugg

SEQ ID NO: 321 - RNA, 20 nt, Artificial Sequence
  synthesized
aucccgcuggccucggggaa

SEQ ID NO: 322 - RNA, 20 nt, Artificial Sequence
  synthesized
aucccgcuggccuuggggaa

SEQ ID NO: 323 - RNA, 20 nt, Artificial Sequence
  synthesized
cacacaucccgcuggccucg

SEQ ID NO: 324 - RNA, 20 nt, Artificial Sequence
  synthesized
cacacaucccgcuggccuug

SEQ ID NO: 325 - RNA, 20 nt, Artificial Sequence
  synthesized
cacguuccccaaggccagcg

SEQ ID NO: 326 - RNA, 20 nt, Artificial Sequence
  synthesized
cacguuccccgaggccagcg

SEQ ID NO: 327 - RNA, 20 nt, Artificial Sequence
  synthesized
ccacguuccccaaggccagc

SEQ ID NO: 328 - RNA, 20 nt, Artificial Sequence
  synthesized
ccacguuccccgaggccagc

SEQ ID NO: 329 - RNA, 20 nt, Artificial Sequence
  synthesized
cccacguuccccaaggccag

SEQ ID NO: 330 - RNA, 20 nt, Artificial Sequence
  synthesized
cccacguuccccgaggccag

SEQ ID NO: 331 - RNA, 20 nt, Artificial Sequence
  synthesized
cccgcuggccucggggaacg

SEQ ID NO: 332 - RNA, 20 nt, Artificial Sequence
  synthesized
cccgcuggccuuggggaacg

SEQ ID NO: 333 - RNA, 20 nt, Artificial Sequence
  synthesized
ccgcuggccucggggaacgu

SEQ ID NO: 334 - RNA, 20 nt, Artificial Sequence
  synthesized
ccgcuggccuuggggaacgu

SEQ ID NO: 335 - RNA, 20 nt, Artificial Sequence
  synthesized
cgcuggccucggggaacgug

SEQ ID NO: 336 - RNA, 20 nt, Artificial Sequence
  synthesized
cgcuggccuuggggaacgug

SEQ ID NO: 337 - RNA, 20 nt, Artificial Sequence
  synthesized
cggggaacgugggacuccag

SEQ ID NO: 338 - RNA, 20 nt, Artificial Sequence
  synthesized
cucggggaacgugggacucc

SEQ ID NO: 339 - RNA, 20 nt, Artificial Sequence
  synthesized
cuggagucccacguucccca

SEQ ID NO: 340 - RNA, 20 nt, Artificial Sequence
  synthesized
cuggagucccacguuccccg

SEQ ID NO: 341 - RNA, 20 nt, Artificial Sequence
  synthesized
cuuggggaacgugggacucc

SEQ ID NO: 342 - RNA, 20 nt, Artificial Sequence
  synthesized
gcacacaucccgcuggccuc

SEQ ID NO: 343 - RNA, 20 nt, Artificial Sequence
  synthesized
gcacacaucccgcuggccuu

SEQ ID NO: 344 - RNA, 20 nt, Artificial Sequence
  synthesized
gccucggggaacgugggacu

SEQ ID NO: 345 - RNA, 20 nt, Artificial Sequence
  synthesized
gccuuggggaacgugggacu

SEQ ID NO: 346 - RNA, 20 nt, Artificial Sequence
  synthesized
gucccacguuccccaaggcc

SEQ ID NO: 347 - RNA, 20 nt, Artificial Sequence
  synthesized
gucccacguuccccgaggcc

SEQ ID NO: 348 - RNA, 20 nt, Artificial Sequence
  synthesized
guuccccaaggccagcggga

SEQ ID NO: 349 - RNA, 20 nt, Artificial Sequence
  synthesized
guuccccgaggccagcggga

SEQ ID NO: 350 - RNA, 20 nt, Artificial Sequence
  synthesized
uccccaaggccagcgggaug

SEQ ID NO: 351 - RNA, 20 nt, Artificial Sequence
  synthesized
uccccgaggccagcgggaug

SEQ ID NO: 352 - RNA, 20 nt, Artificial Sequence
  synthesized
uggggaacgugggacuccag

SEQ ID NO: 353 - RNA, 20 nt, Artificial Sequence
  synthesized
aaugagggugagaucgggcc

SEQ ID NO: 354 - RNA, 20 nt, Artificial Sequence
  synthesized
aggcccgaucucacccucau

SEQ ID NO: 355 - RNA, 20 nt, Artificial Sequence
  synthesized
augagggugagaucgggccu

SEQ ID NO: 356 - RNA, 20 nt, Artificial Sequence
  synthesized
gaucucacccucauugggaa

SEQ ID NO: 357 - RNA, 20 nt, Artificial Sequence
  synthesized
gcccgaucucacccucauug

SEQ ID NO: 358 - RNA, 20 nt, Artificial Sequence
  synthesized
ggcccgaucucacccucauu

SEQ ID NO: 359 - RNA, 20 nt, Artificial Sequence
  synthesized
gggugagaccccaggcccaa

SEQ ID NO: 360 - RNA, 20 nt, Artificial Sequence
  synthesized
gggugagaccccaggcccga

SEQ ID NO: 361 - RNA, 20 nt, Artificial Sequence
  synthesized
gggugagaucgggccugggg

SEQ ID NO: 362 - RNA, 20 nt, Artificial Sequence
  synthesized
gggugagauugggccugggg

SEQ ID NO: 363 - RNA, 20 nt, Artificial Sequence
  synthesized
ugagggugagaucgggccug

SEQ ID NO: 364 - RNA, 20 nt, Artificial Sequence
  synthesized
ugagggugagauugggccug

SEQ ID NO: 365 - RNA, 20 nt, Artificial Sequence
  synthesized
uucccaaugagggugagauc

SEQ ID NO: 366 - RNA, 20 nt, Artificial Sequence
  synthesized
agugggacccaguuacaagg

SEQ ID NO: 367 - RNA, 20 nt, Artificial Sequence
  synthesized
agugggacccaguuccaagg

SEQ ID NO: 368 - RNA, 20 nt, Artificial Sequence
  synthesized
aguuacaaggggccacaaua

SEQ ID NO: 369 - RNA, 20 nt, Artificial Sequence
  synthesized
aguuccaaggggccacaaua

SEQ ID NO: 370 - RNA, 20 nt, Artificial Sequence
  synthesized
auauuguggccccuuggaac

SEQ ID NO: 371 - RNA, 20 nt, Artificial Sequence
  synthesized
auauuguggccccuuguaac

SEQ ID NO: 372 - RNA, 20 nt, Artificial Sequence
  synthesized
cauauuguggccccuuggaa

SEQ ID NO: 373 - RNA, 20 nt, Artificial Sequence
  synthesized
cauauuguggccccuuguaa

SEQ ID NO: 374 - RNA, 20 nt, Artificial Sequence
  synthesized
ccaguuacaaggggccacaa

SEQ ID NO: 375 - RNA, 20 nt, Artificial Sequence
  synthesized
ccaguuccaaggggccacaa

SEQ ID NO: 376 - RNA, 20 nt, Artificial Sequence
  synthesized
ccccuuguaacuggguccca

SEQ ID NO: 377 - RNA, 20 nt, Artificial Sequence
  synthesized
cugagugggacccaguuaca

SEQ ID NO: 378 - RNA, 20 nt, Artificial Sequence
  synthesized
gagugggacccaguuacaag

SEQ ID NO: 379 - RNA, 20 nt, Artificial Sequence
  synthesized
gggacccaguuacaaggggc

SEQ ID NO: 380 - RNA, 20 nt, Artificial Sequence
  synthesized
gggacccaguuccaaggggc

SEQ ID NO: 381 - RNA, 20 nt, Artificial Sequence
  synthesized
guuacaaggggccacaauau

SEQ ID NO: 382 - RNA, 20 nt, Artificial Sequence
  synthesized
guuccaaggggccacaauau

SEQ ID NO: 383 - RNA, 20 nt, Artificial Sequence
  synthesized
uauuguggccccuuggaacu

SEQ ID NO: 384 - RNA, 20 nt, Artificial Sequence
  synthesized
uauuguggccccuuguaacu

SEQ ID NO: 385 - RNA, 20 nt, Artificial Sequence
  synthesized
ugagugggacccaguuacaa

SEQ ID NO: 386 - RNA, 20 nt, Artificial Sequence
  synthesized
auggggcuaagaugagacac

SEQ ID NO: 387 - RNA, 20 nt, Artificial Sequence
  synthesized
auggggcugagaugagacac

SEQ ID NO: 388 - RNA, 20 nt, Artificial Sequence
  synthesized
auugucuccuaauggggcua

SEQ ID NO: 389 - RNA, 20 nt, Artificial Sequence
  synthesized
auugucuccuaauggggcug

SEQ ID NO: 390 - RNA, 20 nt, Artificial Sequence
  synthesized
cucaucucagccccauuagg

SEQ ID NO: 391 - RNA, 20 nt, Artificial Sequence
  synthesized
cucaucuuagccccauuagg

SEQ ID NO: 392 - RNA, 20 nt, Artificial Sequence
  synthesized
cuccuaauggggcuaagaug

SEQ ID NO: 393 - RNA, 20 nt, Artificial Sequence
  synthesized
cuccuaauggggcugagaug

SEQ ID NO: 394 - RNA, 20 nt, Artificial Sequence
  synthesized
gcuaagaugagacacagugg

SEQ ID NO: 395 - RNA, 20 nt, Artificial Sequence
  synthesized
gcugagaugagacacagugg

SEQ ID NO: 396 - RNA, 20 nt, Artificial Sequence
  synthesized
ggcuaagaugagacacagug

SEQ ID NO: 397 - RNA, 20 nt, Artificial Sequence
  synthesized
ggcugagaugagacacagug

SEQ ID NO: 398 - RNA, 20 nt, Artificial Sequence
  synthesized
gggcuaagaugagacacagu

SEQ ID NO: 399 - RNA, 20 nt, Artificial Sequence
  synthesized
gggcugagaugagacacagu

SEQ ID NO: 400 - RNA, 20 nt, Artificial Sequence
  synthesized
ggggcuaagaugagacacag

SEQ ID NO: 401 - RNA, 20 nt, Artificial Sequence
  synthesized
ggggcugagaugagacacag

SEQ ID NO: 402 - RNA, 20 nt, Artificial Sequence
  synthesized
gucucaucucagccccauua

SEQ ID NO: 403 - RNA, 20 nt, Artificial Sequence
  synthesized
gucucaucuuagccccauua

SEQ ID NO: 404 - RNA, 20 nt, Artificial Sequence
  synthesized
gucuccuaauggggcuaaga

SEQ ID NO: 405 - RNA, 20 nt, Artificial Sequence
  synthesized
gucuccuaauggggcugaga

SEQ ID NO: 406 - RNA, 20 nt, Artificial Sequence
  synthesized
ucaucucagccccauuagga

SEQ ID NO: 407 - RNA, 20 nt, Artificial Sequence
  synthesized
ucaucuuagccccauuagga

SEQ ID NO: 408 - RNA, 20 nt, Artificial Sequence
  synthesized
ucucagccccauuaggagac

SEQ ID NO: 409 - RNA, 20 nt, Artificial Sequence
  synthesized
ucuuagccccauuaggagac

SEQ ID NO: 410 - RNA, 20 nt, Artificial Sequence
  synthesized
ugucucaucucagccccauu

SEQ ID NO: 411 - RNA, 20 nt, Artificial Sequence
  synthesized
ugucucaucuuagccccauu

SEQ ID NO: 412 - RNA, 20 nt, Artificial Sequence
  synthesized
aacccugcugugagcaagac

SEQ ID NO: 413 - RNA, 20 nt, Artificial Sequence
  synthesized
aacccuguugugagcaagac

SEQ ID NO: 414 - RNA, 20 nt, Artificial Sequence
  synthesized
cuggucucugggaacccugc

SEQ ID NO: 415 - RNA, 20 nt, Artificial Sequence
  synthesized
cuggucucugggaacccugu

SEQ ID NO: 416 - RNA, 20 nt, Artificial Sequence
  synthesized
gcucacaacaggguucccag

SEQ ID NO: 417 - RNA, 20 nt, Artificial Sequence
  synthesized
gcucacagcaggguucccag

SEQ ID NO: 418 - RNA, 20 nt, Artificial Sequence
  synthesized
gcugugagcaagacagaccc

SEQ ID NO: 419 - RNA, 20 nt, Artificial Sequence
  synthesized
ggaacccugcugugagcaag

SEQ ID NO: 420 - RNA, 20 nt, Artificial Sequence
  synthesized
ggaacccuguugugagcaag

SEQ ID NO: 421 - RNA, 20 nt, Artificial Sequence
  synthesized
gggucugucuugcucacaac

SEQ ID NO: 422 - RNA, 20 nt, Artificial Sequence
  synthesized
gggucugucuugcucacagc

SEQ ID NO: 423 - RNA, 20 nt, Artificial Sequence
  synthesized
ggucucugggaacccugcug

SEQ ID NO: 424 - RNA, 20 nt, Artificial Sequence
  synthesized
ggucucugggaacccuguug

SEQ ID NO: 425 - RNA, 20 nt, Artificial Sequence
  synthesized
ggucugucuugcucacaaca

SEQ ID NO: 426 - RNA, 20 nt, Artificial Sequence
  synthesized
ggucugucuugcucacagca

SEQ ID NO: 427 - RNA, 20 nt, Artificial Sequence
  synthesized
guugugagcaagacagaccc

SEQ ID NO: 428 - RNA, 20 nt, Artificial Sequence
  synthesized
ucacaacaggguucccagag

SEQ ID NO: 429 - RNA, 20 nt, Artificial Sequence
  synthesized
ucacagcaggguucccagag

SEQ ID NO: 430 - RNA, 20 nt, Artificial Sequence
  synthesized
ucugggaacccugcugugag

SEQ ID NO: 431 - RNA, 20 nt, Artificial Sequence
  synthesized
ucugggaacccuguugugag

SEQ ID NO: 432 - RNA, 20 nt, Artificial Sequence
  synthesized
ugggaacccugcugugagca

SEQ ID NO: 433 - RNA, 20 nt, Artificial Sequence
  synthesized
ugggaacccuguugugagca

SEQ ID NO: 434 - RNA, 20 nt, Artificial Sequence
  synthesized
uggucucugggaacccugcu

SEQ ID NO: 435 - RNA, 20 nt, Artificial Sequence
  synthesized
uggucucugggaacccuguu

SEQ ID NO: 436 - RNA, 20 nt, Artificial Sequence
  synthesized
uugcucacaacaggguuccc

SEQ ID NO: 437 - RNA, 20 nt, Artificial Sequence
  synthesized
uugcucacagcaggguuccc

SEQ ID NO: 438 - RNA, 20 nt, Artificial Sequence
  synthesized
caacaacaacacacacacac

SEQ ID NO: 439 - RNA, 20 nt, Artificial Sequence
  synthesized
cacaacaacaacacacacac

SEQ ID NO: 440 - RNA, 20 nt, Artificial Sequence
  synthesized
cacacaacaacaacacacac

SEQ ID NO: 441 - RNA, 20 nt, Artificial Sequence
  synthesized
cacacacaacaacaacacac

SEQ ID NO: 442 - RNA, 20 nt, Artificial Sequence
  synthesized
cacacacacaacaacaacac

SEQ ID NO: 443 - RNA, 20 nt, Artificial Sequence
  synthesized
cacacacacacaacaacaac

SEQ ID NO: 444 - RNA, 20 nt, Artificial Sequence
  synthesized
cacacacacacacaacaaca

SEQ ID NO: 445 - RNA, 20 nt, Artificial Sequence
  synthesized
cacacacacacacacaacaa

SEQ ID NO: 446 - RNA, 20 nt, Artificial Sequence
  synthesized
guguguguguguguuguugu

SEQ ID NO: 447 - RNA, 20 nt, Artificial Sequence
  synthesized
guguguguguguuguuguug

SEQ ID NO: 448 - RNA, 20 nt, Artificial Sequence
  synthesized
guguguguguuguuguugug

SEQ ID NO: 449 - RNA, 20 nt, Artificial Sequence
  synthesized
guguguguuguuguugugug

SEQ ID NO: 450 - RNA, 20 nt, Artificial Sequence
  synthesized
guguguuguuguugugugug

SEQ ID NO: 451 - RNA, 20 nt, Artificial Sequence
  synthesized
guguuguuguugugugugug

SEQ ID NO: 452 - RNA, 20 nt, Artificial Sequence
  synthesized
guuguuguugugugugugug

SEQ ID NO: 453 - RNA, 20 nt, Artificial Sequence
  synthesized
uguuguugugugugugugug

SEQ ID NO: 454 - RNA, 20 nt, Artificial Sequence
  synthesized
uuguugugugugugugugug

SEQ ID NO: 455 - RNA, 20 nt, Artificial Sequence
  synthesized
augcaaaaagcaagaugcug

SEQ ID NO: 456 - RNA, 20 nt, Artificial Sequence
  synthesized
augcaaaaagcaaggugcug

SEQ ID NO: 457 - RNA, 20 nt, Artificial Sequence
  synthesized
cagcaccuugcuuuuugcau

SEQ ID NO: 458 - RNA, 20 nt, Artificial Sequence
  synthesized
cagcaucuugcuuuuugcau

SEQ ID NO: 459 - RNA, 20 nt, Artificial Sequence
  synthesized
cuaugcaaaaagcaagaugc

SEQ ID NO: 460 - RNA, 20 nt, Artificial Sequence
  synthesized
cuaugcaaaaagcaaggugc

SEQ ID NO: 461 - RNA, 20 nt, Artificial Sequence
  synthesized
guaccucagcaccuugcuuu

SEQ ID NO: 462 - RNA, 20 nt, Artificial Sequence
  synthesized
gugcugagguacugcuaagc

SEQ ID NO: 463 - RNA, 20 nt, Artificial Sequence
  synthesized
aacccucugcguggcauagc

SEQ ID NO: 464 - RNA, 20 nt, Artificial Sequence
  synthesized
aacucucugcguggcauagc

SEQ ID NO: 465 - RNA, 20 nt, Artificial Sequence
  synthesized
accuccucaccaacccucug

SEQ ID NO: 466 - RNA, 20 nt, Artificial Sequence
  synthesized
accuccucaccaacucucug

SEQ ID NO: 467 - RNA, 20 nt, Artificial Sequence
  synthesized
acgcagagaguuggugagga

SEQ ID NO: 468 - RNA, 20 nt, Artificial Sequence
  synthesized
acgcagaggguuggugagga

SEQ ID NO: 469 - RNA, 20 nt, Artificial Sequence
  synthesized
agagaguuggugaggaggug

SEQ ID NO: 470 - RNA, 20 nt, Artificial Sequence
  synthesized
agaggguuggugaggaggug

SEQ ID NO: 471 - RNA, 20 nt, Artificial Sequence
  synthesized
agaguuggugaggagguggg

SEQ ID NO: 472 - RNA, 20 nt, Artificial Sequence
  synthesized
aggguuggugaggagguggg

SEQ ID NO: 473 - RNA, 20 nt, Artificial Sequence
  synthesized
cacgcagagaguuggugagg

SEQ ID NO: 474 - RNA, 20 nt, Artificial Sequence
  synthesized
cacgcagaggguuggugagg

SEQ ID NO: 475 - RNA, 20 nt, Artificial Sequence
  synthesized
cagagaguuggugaggaggu

SEQ ID NO: 476 - RNA, 20 nt, Artificial Sequence
  synthesized
cagaggguuggugaggaggu

SEQ ID NO: 477 - RNA, 20 nt, Artificial Sequence
  synthesized
ccaccuccucaccaacccuc

SEQ ID NO: 478 - RNA, 20 nt, Artificial Sequence
  synthesized
ccaccuccucaccaacucuc

SEQ ID NO: 479 - RNA, 20 nt, Artificial Sequence
  synthesized
cucaccaacccucugcgugg

SEQ ID NO: 480 - RNA, 20 nt, Artificial Sequence
  synthesized
cucaccaacucucugcgugg

SEQ ID NO: 481 - RNA, 20 nt, Artificial Sequence
  synthesized
cuccucaccaacccucugcg

SEQ ID NO: 482 - RNA, 20 nt, Artificial Sequence
  synthesized
cuccucaccaacucucugcg

SEQ ID NO: 483 - RNA, 20 nt, Artificial Sequence
  synthesized
gagaguuggugaggaggugg

SEQ ID NO: 484 - RNA, 20 nt, Artificial Sequence
  synthesized
gaggguuggugaggaggugg

SEQ ID NO: 485 - RNA, 20 nt, Artificial Sequence
  synthesized
gaguuggugaggaggugggg

SEQ ID NO: 486 - RNA, 20 nt, Artificial Sequence
  synthesized
gcagagaguuggugaggagg

SEQ ID NO: 487 - RNA, 20 nt, Artificial Sequence
  synthesized
gcagaggguuggugaggagg

SEQ ID NO: 488 - RNA, 20 nt, Artificial Sequence
  synthesized
gccacgcagagaguugguga

SEQ ID NO: 489 - RNA, 20 nt, Artificial Sequence
  synthesized
gccacgcagaggguugguga

SEQ ID NO: 490 - RNA, 20 nt, Artificial Sequence
  synthesized
gcuaugccacgcagagaguu

SEQ ID NO: 491 - RNA, 20 nt, Artificial Sequence
  synthesized
gcuaugccacgcagaggguu

SEQ ID NO: 492 - RNA, 20 nt, Artificial Sequence
  synthesized
ggcuaugccacgcagagagu

SEQ ID NO: 493 - RNA, 20 nt, Artificial Sequence
  synthesized
ggcuaugccacgcagagggu

SEQ ID NO: 494 - RNA, 20 nt, Artificial Sequence
  synthesized
ggguuggugaggaggugggg

SEQ ID NO: 495 - RNA, 20 nt, Artificial Sequence
  synthesized
uaugccacgcagagaguugg

SEQ ID NO: 496 - RNA, 20 nt, Artificial Sequence
  synthesized
uaugccacgcagaggguugg

SEQ ID NO: 497 - RNA, 20 nt, Artificial Sequence
  synthesized
ugccacgcagagaguuggug

SEQ ID NO: 498 - RNA, 20 nt, Artificial Sequence
  synthesized
ugccacgcagaggguuggug

SEQ ID NO: 499 - RNA, 20 nt, Artificial Sequence
  synthesized
accgucaaggagguacgggc

SEQ ID NO: 500 - RNA, 20 nt, Artificial Sequence
  synthesized
accgucaaggagguaugggc

SEQ ID NO: 501 - RNA, 20 nt, Artificial Sequence
  synthesized
aggagguacgggccgggggg

SEQ ID NO: 502 - RNA, 20 nt, Artificial Sequence
  synthesized
aggagguaugggccgggggg

SEQ ID NO: 503 - RNA, 20 nt, Artificial Sequence
  synthesized
caaggagguacgggccgggg

SEQ ID NO: 504 - RNA, 20 nt, Artificial Sequence
  synthesized
caaggagguaugggccgggg

SEQ ID NO: 505 - RNA, 20 nt, Artificial Sequence
  synthesized
ccauaccuccuugacgguga

SEQ ID NO: 506 - RNA, 20 nt, Artificial Sequence
  synthesized
ccccccggcccauaccuccu

SEQ ID NO: 507 - RNA, 20 nt, Artificial Sequence
  synthesized
ccccccggcccguaccuccu

SEQ ID NO: 508 - RNA, 20 nt, Artificial Sequence
  synthesized
cccggcccauaccuccuuga

SEQ ID NO: 509 - RNA, 20 nt, Artificial Sequence
  synthesized
cccggcccguaccuccuuga

SEQ ID NO: 510 - RNA, 20 nt, Artificial Sequence
  synthesized
ccggcccauaccuccuugac

SEQ ID NO: 511 - RNA, 20 nt, Artificial Sequence
  synthesized
ccggcccguaccuccuugac

SEQ ID NO: 512 - RNA, 20 nt, Artificial Sequence
  synthesized
ccguaccuccuugacgguga

SEQ ID NO: 513 - RNA, 20 nt, Artificial Sequence
  synthesized
ccgucaaggagguacgggcc

SEQ ID NO: 514 - RNA, 20 nt, Artificial Sequence
  synthesized
ccgucaaggagguaugggcc

SEQ ID NO: 515 - RNA, 20 nt, Artificial Sequence
  synthesized
cgucaaggagguacgggccg

SEQ ID NO: 516 - RNA, 20 nt, Artificial Sequence
  synthesized
cgucaaggagguaugggccg

SEQ ID NO: 517 - RNA, 20 nt, Artificial Sequence
  synthesized
cuucaccgucaaggagguac

SEQ ID NO: 518 - RNA, 20 nt, Artificial Sequence
  synthesized
cuucaccgucaaggagguau

SEQ ID NO: 519 - RNA, 20 nt, Artificial Sequence
  synthesized
gagguacgggccggggggug

SEQ ID NO: 520 - RNA, 20 nt, Artificial Sequence
  synthesized
gagguaugggccggggggug

SEQ ID NO: 521 - RNA, 20 nt, Artificial Sequence
  synthesized
ggagguacgggccggggggu

SEQ ID NO: 522 - RNA, 20 nt, Artificial Sequence
  synthesized
ggagguaugggccggggggu

SEQ ID NO: 523 - RNA, 20 nt, Artificial Sequence
  synthesized
ggcccauaccuccuugacgg

SEQ ID NO: 524 - RNA, 20 nt, Artificial Sequence
  synthesized
ggcccguaccuccuugacgg

SEQ ID NO: 525 - RNA, 20 nt, Artificial Sequence
  synthesized
gguacgggccgggggguggg

SEQ ID NO: 526 - RNA, 20 nt, Artificial Sequence
  synthesized
gguaugggccgggggguggg

SEQ ID NO: 527 - RNA, 20 nt, Artificial Sequence
  synthesized
gucaaggagguacgggccgg

SEQ ID NO: 528 - RNA, 20 nt, Artificial Sequence
  synthesized
gucaaggagguaugggccgg

SEQ ID NO: 529 - RNA, 20 nt, Artificial Sequence
  synthesized
ucaaggagguacgggccggg

SEQ ID NO: 530 - RNA, 20 nt, Artificial Sequence
  synthesized
ucaaggagguaugggccggg

SEQ ID NO: 531 - RNA, 20 nt, Artificial Sequence
  synthesized
acccuacaccuucccccagc

SEQ ID NO: 532 - RNA, 20 nt, Artificial Sequence
  synthesized
cauacccuacaccuuccccc

SEQ ID NO: 533 - RNA, 20 nt, Artificial Sequence
  synthesized
cauccccuacaccuuccccc

SEQ ID NO: 534 - RNA, 20 nt, Artificial Sequence
  synthesized
ccccuacaccuucccccagc

SEQ ID NO: 535 - RNA, 20 nt, Artificial Sequence
  synthesized
cuauaggcgucucccauacc

SEQ ID NO: 536 - RNA, 20 nt, Artificial Sequence
  synthesized
cuauaggcgucucccauccc

SEQ ID NO: 537 - RNA, 20 nt, Artificial Sequence
  synthesized
cugggggaagguguagggga

SEQ ID NO: 538 - RNA, 20 nt, Artificial Sequence
  synthesized
cugggggaagguguagggua

SEQ ID NO: 539 - RNA, 20 nt, Artificial Sequence
  synthesized
gaugggagacgccuauaguc

SEQ ID NO: 540 - RNA, 20 nt, Artificial Sequence
  synthesized
ggaugggagacgccuauagu

SEQ ID NO: 541 - RNA, 20 nt, Artificial Sequence
  synthesized
gggaagguguaggggauggg

SEQ ID NO: 542 - RNA, 20 nt, Artificial Sequence
  synthesized
gggaagguguaggguauggg

SEQ ID NO: 543 - RNA, 20 nt, Artificial Sequence
  synthesized
ggggaugggagacgccuaua

SEQ ID NO: 544 - RNA, 20 nt, Artificial Sequence
  synthesized
gggggaagguguaggggaug

SEQ ID NO: 545 - RNA, 20 nt, Artificial Sequence
  synthesized
gggggaagguguaggguaug

SEQ ID NO: 546 - RNA, 20 nt, Artificial Sequence
  synthesized
ggguaugggagacgccuaua

SEQ ID NO: 547 - RNA, 20 nt, Artificial Sequence
  synthesized
guaugggagacgccuauagu

SEQ ID NO: 548 - RNA, 20 nt, Artificial Sequence
  synthesized
uaugggagacgccuauaguc

SEQ ID NO: 549 - RNA, 20 nt, Artificial Sequence
  synthesized
ucccauacccuacaccuucc

SEQ ID NO: 550 - RNA, 20 nt, Artificial Sequence
  synthesized
ucccauccccuacaccuucc

SEQ ID NO: 551 - RNA, 20 nt, Artificial Sequence
  synthesized
ugggggaagguguaggggau

SEQ ID NO: 552 - RNA, 20 nt, Artificial Sequence
  synthesized
ugggggaagguguaggguau

SEQ ID NO: 553 - RNA, 20 nt, Artificial Sequence
  synthesized
uguaggggaugggagacgcc

SEQ ID NO: 554 - RNA, 20 nt, Artificial Sequence
  synthesized
uguaggguaugggagacgcc

SEQ ID NO: 555 - RNA, 20 nt, Artificial Sequence
  synthesized
aacauggcccaagauagaug

SEQ ID NO: 556 - RNA, 20 nt, Artificial Sequence
  synthesized
aacauggcccgagauagaug

SEQ ID NO: 557 - RNA, 20 nt, Artificial Sequence
  synthesized
acauggcccaagauagaugc

SEQ ID NO: 558 - RNA, 20 nt, Artificial Sequence
  synthesized
acauggcccgagauagaugc

SEQ ID NO: 559 - RNA, 20 nt, Artificial Sequence
  synthesized
caaacauggcccaagauaga

SEQ ID NO: 560 - RNA, 20 nt, Artificial Sequence
  synthesized
caaacauggcccgagauaga

SEQ ID NO: 561 - RNA, 20 nt, Artificial Sequence
  synthesized
caucuaucucgggccauguu

SEQ ID NO: 562 - RNA, 20 nt, Artificial Sequence
  synthesized
caucuaucuugggccauguu

SEQ ID NO: 563 - RNA, 20 nt, Artificial Sequence
  synthesized
cucgggccauguuugcagca

SEQ ID NO: 564 - RNA, 20 nt, Artificial Sequence
  synthesized
cugcaaacauggcccaagau

SEQ ID NO: 565 - RNA, 20 nt, Artificial Sequence
  synthesized
cugcaaacauggcccgagau

SEQ ID NO: 566 - RNA, 20 nt, Artificial Sequence
  synthesized
cuugggccauguuugcagca

SEQ ID NO: 567 - RNA, 20 nt, Artificial Sequence
  synthesized
ggugcugcaaacauggccca

SEQ ID NO: 568 - RNA, 20 nt, Artificial Sequence
  synthesized
ggugcugcaaacauggcccg

SEQ ID NO: 569 - RNA, 20 nt, Artificial Sequence
  synthesized
ucuaucucgggccauguuug

SEQ ID NO: 570 - RNA, 20 nt, Artificial Sequence
  synthesized
ucuaucuugggccauguuug

SEQ ID NO: 571 - RNA, 20 nt, Artificial Sequence
  synthesized
uggaagcccgcaucuaucuc

SEQ ID NO: 572 - RNA, 20 nt, Artificial Sequence
  synthesized
uggaagcccgcaucuaucuu

SEQ ID NO: 573 - RNA, 20 nt, Artificial Sequence
  synthesized
aggccuucacagcauucuug

SEQ ID NO: 574 - RNA, 20 nt, Artificial Sequence
  synthesized
aggccuucgcagcauucuug

SEQ ID NO: 575 - RNA, 20 nt, Artificial Sequence
  synthesized
caggccuucacagcauucuu

SEQ ID NO: 576 - RNA, 20 nt, Artificial Sequence
  synthesized
caggccuucgcagcauucuu

SEQ ID NO: 577 - RNA, 20 nt, Artificial Sequence
  synthesized
ccaagaaugcugcgaaggcc

SEQ ID NO: 578 - RNA, 20 nt, Artificial Sequence
  synthesized
ccaagaaugcugugaaggcc

SEQ ID NO: 579 - RNA, 20 nt, Artificial Sequence
  synthesized
cccacccaagaaugcugcga

SEQ ID NO: 580 - RNA, 20 nt, Artificial Sequence
  synthesized
cccacccaagaaugcuguga

SEQ ID NO: 581 - RNA, 20 nt, Artificial Sequence
  synthesized
ccuucacagcauucuugggu

SEQ ID NO: 582 - RNA, 20 nt, Artificial Sequence
  synthesized
ccuucgcagcauucuugggu

SEQ ID NO: 583 - RNA, 20 nt, Artificial Sequence
  synthesized
cucccacccaagaaugcugc

SEQ ID NO: 584 - RNA, 20 nt, Artificial Sequence
  synthesized
cucccacccaagaaugcugu

SEQ ID NO: 585 - RNA, 20 nt, Artificial Sequence
  synthesized
cuucacagcauucuugggug

SEQ ID NO: 586 - RNA, 20 nt, Artificial Sequence
  synthesized
cuucgcagcauucuugggug

SEQ ID NO: 587 - RNA, 20 nt, Artificial Sequence
  synthesized
gaaugcugcgaaggccugag

SEQ ID NO: 588 - RNA, 20 nt, Artificial Sequence
  synthesized
gaaugcugugaaggccugag

SEQ ID NO: 589 - RNA, 20 nt, Artificial Sequence
  synthesized
gccuucacagcauucuuggg

SEQ ID NO: 590 - RNA, 20 nt, Artificial Sequence
  synthesized
gccuucgcagcauucuuggg

SEQ ID NO: 591 - RNA, 20 nt, Artificial Sequence
  synthesized
ucacagcauucuuggguggg

SEQ ID NO: 592 - RNA, 20 nt, Artificial Sequence
  synthesized
ucaggccuucacagcauucu

SEQ ID NO: 593 - RNA, 20 nt, Artificial Sequence
  synthesized
ucaggccuucgcagcauucu

SEQ ID NO: 594 - RNA, 20 nt, Artificial Sequence
  synthesized
ucgcagcauucuuggguggg

SEQ ID NO: 595 - RNA, 20 nt, Artificial Sequence
  synthesized
aaagagcacugucaccucag

SEQ ID NO: 596 - RNA, 20 nt, Artificial Sequence
  synthesized
aaagagcauugucaccucag

SEQ ID NO: 597 - RNA, 20 nt, Artificial Sequence
  synthesized
auaaagagcacugucaccuc

SEQ ID NO: 598 - RNA, 20 nt, Artificial Sequence
  synthesized
auaaagagcauugucaccuc

SEQ ID NO: 599 - RNA, 20 nt, Artificial Sequence
  synthesized
cuuuacagaauaaagagcac

SEQ ID NO: 600 - RNA, 20 nt, Artificial Sequence
  synthesized
cuuuacagaauaaagagcau

SEQ ID NO: 601 - RNA, 20 nt, Artificial Sequence
  synthesized
gagcacugucaccucaguga

SEQ ID NO: 602 - RNA, 20 nt, Artificial Sequence
  synthesized
gagcauugucaccucaguga

SEQ ID NO: 603 - RNA, 20 nt, Artificial Sequence
  synthesized
aagugggacccaguuccaag

SEQ ID NO: 604 - RNA, 20 nt, Artificial Sequence
  synthesized
aaucgccuagaggcuaagug

SEQ ID NO: 605 - RNA, 20 nt, Artificial Sequence
  synthesized
aaucgccuagaggcugagug

SEQ ID NO: 606 - RNA, 20 nt, Artificial Sequence
  synthesized
acaaucgccuagaggcuaag

SEQ ID NO: 607 - RNA, 20 nt, Artificial Sequence
  synthesized
acaaucgccuagaggcugag

SEQ ID NO: 608 - RNA, 20 nt, Artificial Sequence
  synthesized
agacaaucgccuagaggcua

SEQ ID NO: 609 - RNA, 20 nt, Artificial Sequence
  synthesized
agacaaucgccuagaggcug

SEQ ID NO: 610 - RNA, 20 nt, Artificial Sequence
  synthesized
caaucgccuagaggcuaagu

SEQ ID NO: 611 - RNA, 20 nt, Artificial Sequence
  synthesized
caaucgccuagaggcugagu

SEQ ID NO: 612 - RNA, 20 nt, Artificial Sequence
  synthesized
cuaagugggacccaguucca

SEQ ID NO: 613 - RNA, 20 nt, Artificial Sequence
  synthesized
cugggucccacucagccucu

SEQ ID NO: 614 - RNA, 20 nt, Artificial Sequence
  synthesized
cugggucccacuuagccucu

SEQ ID NO: 615 - RNA, 20 nt, Artificial Sequence
  synthesized
ggucccacucagccucuagg

SEQ ID NO: 616 - RNA, 20 nt, Artificial Sequence
  synthesized
ggucccacuuagccucuagg

SEQ ID NO: 617 - RNA, 20 nt, Artificial Sequence
  synthesized
uaagugggacccaguuccaa

SEQ ID NO: 618 - RNA, 20 nt, Artificial Sequence
  synthesized
ugggucccacucagccucua

SEQ ID NO: 619 - RNA, 20 nt, Artificial Sequence
  synthesized
ugggucccacuuagccucua

SEQ ID NO: 620 - RNA, 20 nt, Artificial Sequence
  synthesized
aagaggcuugagucagggcc

SEQ ID NO: 621 - RNA, 20 nt, Artificial Sequence
  synthesized
aagaggcuugaguuagggcc

SEQ ID NO: 622 - RNA, 20 nt, Artificial Sequence
  synthesized
aaggcaagaggcuugaguca

SEQ ID NO: 623 - RNA, 20 nt, Artificial Sequence
  synthesized
aaggcaagaggcuugaguua

SEQ ID NO: 624 - RNA, 20 nt, Artificial Sequence
  synthesized
agaggcuugagucagggcca

SEQ ID NO: 625 - RNA, 20 nt, Artificial Sequence
  synthesized
agaggcuugaguuagggcca

SEQ ID NO: 626 - RNA, 20 nt, Artificial Sequence
  synthesized
cuugagucagggccagggcu

SEQ ID NO: 627 - RNA, 20 nt, Artificial Sequence
  synthesized
cuugaguuagggccagggcu

SEQ ID NO: 628 - RNA, 20 nt, Artificial Sequence
  synthesized
gaaggcaagaggcuugaguc

SEQ ID NO: 629 - RNA, 20 nt, Artificial Sequence
  synthesized
gaaggcaagaggcuugaguu

SEQ ID NO: 630 - RNA, 20 nt, Artificial Sequence
  synthesized
ucagggccagggcugcccac

SEQ ID NO: 631 - RNA, 20 nt, Artificial Sequence
  synthesized
ugggcagcccuggcccuaac

SEQ ID NO: 632 - RNA, 20 nt, Artificial Sequence
  synthesized
ugggcagcccuggcccugac

SEQ ID NO: 633 - RNA, 20 nt, Artificial Sequence
  synthesized
uuagggccagggcugcccac

SEQ ID NO: 634 - RNA, 20 nt, Artificial Sequence
  synthesized
aacaauggccagagauuccc

SEQ ID NO: 635 - RNA, 20 nt, Artificial Sequence
  synthesized
aacaauggccagcgauuccc

SEQ ID NO: 636 - RNA, 20 nt, Artificial Sequence
  synthesized
agauucccugagaaugggac

SEQ ID NO: 637 - RNA, 20 nt, Artificial Sequence
  synthesized
agggaaucgcuggccauugu

SEQ ID NO: 638 - RNA, 20 nt, Artificial Sequence
  synthesized
agggaaucucuggccauugu

SEQ ID NO: 639 - RNA, 20 nt, Artificial Sequence
  synthesized
caauggccagagauucccug

SEQ ID NO: 640 - RNA, 20 nt, Artificial Sequence
  synthesized
caauggccagcgauucccug

SEQ ID NO: 641 - RNA, 20 nt, Artificial Sequence
  synthesized
ccagagauucccugagaaug

SEQ ID NO: 642 - RNA, 20 nt, Artificial Sequence
  synthesized
ccagcgauucccugagaaug

SEQ ID NO: 643 - RNA, 20 nt, Artificial Sequence
  synthesized
cgauucccugagaaugggac

SEQ ID NO: 644 - RNA, 20 nt, Artificial Sequence
  synthesized
gccagagauucccugagaau

SEQ ID NO: 645 - RNA, 20 nt, Artificial Sequence
  synthesized
gccagcgauucccugagaau

SEQ ID NO: 646 - RNA, 20 nt, Artificial Sequence
  synthesized
ggaaucgcuggccauuguug

SEQ ID NO: 647 - RNA, 20 nt, Artificial Sequence
  synthesized
ggaaucucuggccauuguug

SEQ ID NO: 648 - RNA, 20 nt, Artificial Sequence
  synthesized
ggccagagauucccugagaa

SEQ ID NO: 649 - RNA, 20 nt, Artificial Sequence
  synthesized
ggccagcgauucccugagaa

SEQ ID NO: 650 - RNA, 20 nt, Artificial Sequence
  synthesized
gggaaucgcuggccauuguu

SEQ ID NO: 651 - RNA, 20 nt, Artificial Sequence
  synthesized
gggaaucucuggccauuguu

SEQ ID NO: 652 - RNA, 20 nt, Artificial Sequence
  synthesized
ucccauucucagggaaucgc

SEQ ID NO: 653 - RNA, 20 nt, Artificial Sequence
  synthesized
ucccauucucagggaaucuc

SEQ ID NO: 654 - RNA, 20 nt, Artificial Sequence
  synthesized
aaacugggacugacccugca

SEQ ID NO: 655 - RNA, 20 nt, Artificial Sequence
  synthesized
aaacugggacugaccuugca

SEQ ID NO: 656 - RNA, 20 nt, Artificial Sequence
  synthesized
aacugggacugacccugcag

SEQ ID NO: 657 - RNA, 20 nt, Artificial Sequence
  synthesized
aacugggacugaccuugcag

SEQ ID NO: 658 - RNA, 20 nt, Artificial Sequence
  synthesized
cugggacugacccugcagag

SEQ ID NO: 659 - RNA, 20 nt, Artificial Sequence
  synthesized
cugggacugaccuugcagag

SEQ ID NO: 660 - RNA, 20 nt, Artificial Sequence
  synthesized
ggacugacccugcagagaac

SEQ ID NO: 661 - RNA, 20 nt, Artificial Sequence
  synthesized
ggacugaccuugcagagaac

SEQ ID NO: 662 - RNA, 20 nt, Artificial Sequence
  synthesized
gggugguuguucucugcaag

SEQ ID NO: 663 - RNA, 20 nt, Artificial Sequence
  synthesized
gggugguuguucucugcagg

SEQ ID NO: 664 - RNA, 20 nt, Artificial Sequence
  synthesized
uaaacugggacugacccugc

SEQ ID NO: 665 - RNA, 20 nt, Artificial Sequence
  synthesized
uaaacugggacugaccuugc

SEQ ID NO: 666 - RNA, 20 nt, Artificial Sequence
  synthesized
ugacccugcagagaacaacc

SEQ ID NO: 667 - RNA, 20 nt, Artificial Sequence
  synthesized
ugaccuugcagagaacaacc

SEQ ID NO: 668 - RNA, 20 nt, Artificial Sequence
  synthesized
ugcaaggucagucccaguuu

SEQ ID NO: 669 - RNA, 20 nt, Artificial Sequence
  synthesized
ugcagggucagucccaguuu

SEQ ID NO: 670 - RNA, 20 nt, Artificial Sequence
  synthesized
acugcuaagcugugugggau

SEQ ID NO: 671 - RNA, 20 nt, Artificial Sequence
  synthesized
agguacugcuaagcugugug

SEQ ID NO: 672 - RNA, 20 nt, Artificial Sequence
  synthesized
agguucugcuaagcugugug

SEQ ID NO: 673 - RNA, 20 nt, Artificial Sequence
  synthesized
augcugagguucugcuaagc

SEQ ID NO: 674 - RNA, 20 nt, Artificial Sequence
  synthesized
cacacagcuuagcagaaccu

SEQ ID NO: 675 - RNA, 20 nt, Artificial Sequence
  synthesized
cacacagcuuagcaguaccu

SEQ ID NO: 676 - RNA, 20 nt, Artificial Sequence
  synthesized
cccacacagcuuagcagaac

SEQ ID NO: 677 - RNA, 20 nt, Artificial Sequence
  synthesized
cccacacagcuuagcaguac

SEQ ID NO: 678 - RNA, 20 nt, Artificial Sequence
  synthesized
gaaccucagcaucuugcuuu

SEQ ID NO: 679 - RNA, 20 nt, Artificial Sequence
  synthesized
gagguacugcuaagcugugu

SEQ ID NO: 680 - RNA, 20 nt, Artificial Sequence
  synthesized
gagguucugcuaagcugugu

SEQ ID NO: 681 - RNA, 20 nt, Artificial Sequence
  synthesized
gcugagguacugcuaagcug

SEQ ID NO: 682 - RNA, 20 nt, Artificial Sequence
  synthesized
gcugagguucugcuaagcug

SEQ ID NO: 683 - RNA, 20 nt, Artificial Sequence
  synthesized
uacugcuaagcuguguggga

SEQ ID NO: 684 - RNA, 20 nt, Artificial Sequence
  synthesized
ucugcuaagcugugugggau

SEQ ID NO: 685 - RNA, 20 nt, Artificial Sequence
  synthesized
ugagguacugcuaagcugug

SEQ ID NO: 686 - RNA, 20 nt, Artificial Sequence
  synthesized
ugagguucugcuaagcugug

SEQ ID NO: 687 - RNA, 20 nt, Artificial Sequence
  synthesized
uucugcuaagcuguguggga

SEQ ID NO: 688 - RNA, 20 nt, Artificial Sequence
  synthesized
agucuguuucuucuuccgcc

SEQ ID NO: 689 - RNA, 20 nt, Artificial Sequence
  synthesized
agucuguuucuucuucugcc

SEQ ID NO: 690 - RNA, 20 nt, Artificial Sequence
  synthesized
cgcccuacaccccuacccug

SEQ ID NO: 691 - RNA, 20 nt, Artificial Sequence
  synthesized
ggguagggguguagggcaga

SEQ ID NO: 692 - RNA, 20 nt, Artificial Sequence
  synthesized
ggguagggguguagggcgga

SEQ ID NO: 693 - RNA, 20 nt, Artificial Sequence
  synthesized
uagggguguagggcagaaga

SEQ ID NO: 694 - RNA, 20 nt, Artificial Sequence
  synthesized
uagggguguagggcggaaga

SEQ ID NO: 695 - RNA, 20 nt, Artificial Sequence
  synthesized
uccgcccuacaccccuaccc

SEQ ID NO: 696 - RNA, 20 nt, Artificial Sequence
  synthesized
ucugcccuacaccccuaccc

SEQ ID NO: 697 - RNA, 20 nt, Artificial Sequence
  synthesized
ugcccuacaccccuacccug

SEQ ID NO: 698 - RNA, 20 nt, Artificial Sequence
  synthesized
uguagggcagaagaagaaac

SEQ ID NO: 699 - RNA, 20 nt, Artificial Sequence
  synthesized
uguagggcggaagaagaaac

SEQ ID NO: 700 - RNA, 20 nt, Artificial Sequence
  synthesized
agacacuuuuccagaaagca

SEQ ID NO: 701 - RNA, 20 nt, Artificial Sequence
  synthesized
agugucccagcuuagggaua

SEQ ID NO: 702 - RNA, 20 nt, Artificial Sequence
  synthesized
agugucucagcuuagggaua

SEQ ID NO: 703 - RNA, 20 nt, Artificial Sequence
  synthesized
ccagcuuagggauaaguguc

SEQ ID NO: 704 - RNA, 20 nt, Artificial Sequence
  synthesized
cuaagcugagacacuuuucc

SEQ ID NO: 705 - RNA, 20 nt, Artificial Sequence
  synthesized
cuaagcugggacacuuuucc

SEQ ID NO: 706 - RNA, 20 nt, Artificial Sequence
  synthesized
cuggaaaagugucccagcuu

SEQ ID NO: 707 - RNA, 20 nt, Artificial Sequence
  synthesized
cuggaaaagugucucagcuu

SEQ ID NO: 708 - RNA, 20 nt, Artificial Sequence
  synthesized
gagacacuuuuccagaaagc

SEQ ID NO: 709 - RNA, 20 nt, Artificial Sequence
  synthesized
ggaaaagugucccagcuuag

SEQ ID NO: 710 - RNA, 20 nt, Artificial Sequence
  synthesized
ggaaaagugucucagcuuag

SEQ ID NO: 711 - RNA, 20 nt, Artificial Sequence
  synthesized
ggacacuuuuccagaaagca

SEQ ID NO: 712 - RNA, 20 nt, Artificial Sequence
  synthesized
gggacacuuuuccagaaagc

SEQ ID NO: 713 - RNA, 20 nt, Artificial Sequence
  synthesized
uaagcugagacacuuuucca

SEQ ID NO: 714 - RNA, 20 nt, Artificial Sequence
  synthesized
uaagcugggacacuuuucca

SEQ ID NO: 715 - RNA, 20 nt, Artificial Sequence
  synthesized
ucagcuuagggauaaguguc

SEQ ID NO: 716 - RNA, 20 nt, Artificial Sequence
  synthesized
ucccagcuuagggauaagug

SEQ ID NO: 717 - RNA, 20 nt, Artificial Sequence
  synthesized
ucucagcuuagggauaagug

SEQ ID NO: 718 - RNA, 20 nt, Artificial Sequence
  synthesized
uggaaaagugucccagcuua

SEQ ID NO: 719 - RNA, 20 nt, Artificial Sequence
  synthesized
uggaaaagugucucagcuua

SEQ ID NO: 720 - RNA, 20 nt, Artificial Sequence
  synthesized
acgggccucaggaaacccag

SEQ ID NO: 721 - RNA, 20 nt, Artificial Sequence
  synthesized
acgggccucaggaaauccag

SEQ ID NO: 722 - RNA, 20 nt, Artificial Sequence
  synthesized
aggaaacccagagcguccag

SEQ ID NO: 723 - RNA, 20 nt, Artificial Sequence
  synthesized
aggaaauccagagcguccag

SEQ ID NO: 724 - RNA, 20 nt, Artificial Sequence
  synthesized
auuuccugaggcccguccac

SEQ ID NO: 725 - RNA, 20 nt, Artificial Sequence
  synthesized
gacgcucuggauuuccugag

SEQ ID NO: 726 - RNA, 20 nt, Artificial Sequence
  synthesized
gacgcucuggguuuccugag

SEQ ID NO: 727 - RNA, 20 nt, Artificial Sequence
  synthesized
gacgggccucaggaaaccca

SEQ ID NO: 728 - RNA, 20 nt, Artificial Sequence
  synthesized
gacgggccucaggaaaucca

SEQ ID NO: 729 - RNA, 20 nt, Artificial Sequence
  synthesized
gcuggacgcucuggauuucc

SEQ ID NO: 730 - RNA, 20 nt, Artificial Sequence
  synthesized
gcuggacgcucuggguuucc

SEQ ID NO: 731 - RNA, 20 nt, Artificial Sequence
  synthesized
ggacgggccucaggaaaccc

SEQ ID NO: 732 - RNA, 20 nt, Artificial Sequence
  synthesized
ggacgggccucaggaaaucc

SEQ ID NO: 733 - RNA, 20 nt, Artificial Sequence
  synthesized
guuuccugaggcccguccac

SEQ ID NO: 734 - RNA, 20 nt, Artificial Sequence
  synthesized
ucaggaaacccagagcgucc

SEQ ID NO: 735 - RNA, 20 nt, Artificial Sequence
  synthesized
ucaggaaauccagagcgucc

SEQ ID NO: 736 - RNA, 20 nt, Artificial Sequence
  synthesized
uggacgcucuggauuuccug

SEQ ID NO: 737 - RNA, 20 nt, Artificial Sequence
  synthesized
uggacgcucuggguuuccug

SEQ ID NO: 738 - RNA, 20 nt, Artificial Sequence
  synthesized
aagggacacgaaucagauca

SEQ ID NO: 739 - RNA, 20 nt, Artificial Sequence
  synthesized
aagggacacggaucagauca

SEQ ID NO: 740 - RNA, 20 nt, Artificial Sequence
  synthesized
acacgaaucagaucaggggg

SEQ ID NO: 741 - RNA, 20 nt, Artificial Sequence
  synthesized
acacggaucagaucaggggg

SEQ ID NO: 742 - RNA, 20 nt, Artificial Sequence
  synthesized
acgaaucagaucaggggguc

SEQ ID NO: 743 - RNA, 20 nt, Artificial Sequence
  synthesized
acggaucagaucaggggguc

SEQ ID NO: 744 - RNA, 20 nt, Artificial Sequence
  synthesized
agggacacgaaucagaucag

SEQ ID NO: 745 - RNA, 20 nt, Artificial Sequence
  synthesized
agggacacggaucagaucag

SEQ ID NO: 746 - RNA, 20 nt, Artificial Sequence
  synthesized
aucugauccgugucccuuau

SEQ ID NO: 747 - RNA, 20 nt, Artificial Sequence
  synthesized
aucugauucgugucccuuau

SEQ ID NO: 748 - RNA, 20 nt, Artificial Sequence
  synthesized
ccugacccccugaucugauc

SEQ ID NO: 749 - RNA, 20 nt, Artificial Sequence
  synthesized
ccugacccccugaucugauu

SEQ ID NO: 750 - RNA, 20 nt, Artificial Sequence
  synthesized
cgaaucagaucaggggguca

SEQ ID NO: 751 - RNA, 20 nt, Artificial Sequence
  synthesized
cggaucagaucaggggguca

SEQ ID NO: 752 - RNA, 20 nt, Artificial Sequence
  synthesized
gaucugauccgugucccuua

SEQ ID NO: 753 - RNA, 20 nt, Artificial Sequence
  synthesized
gaucugauucgugucccuua

SEQ ID NO: 754 - RNA, 20 nt, Artificial Sequence
  synthesized
gcccauaagggacacgaauc

SEQ ID NO: 755 - RNA, 20 nt, Artificial Sequence
  synthesized
gcccauaagggacacggauc

SEQ ID NO: 756 - RNA, 20 nt, Artificial Sequence
  synthesized
gggacacgaaucagaucagg

SEQ ID NO: 757 - RNA, 20 nt, Artificial Sequence
  synthesized
gggacacggaucagaucagg

SEQ ID NO: 758 - RNA, 20 nt, Artificial Sequence
  synthesized
gggcccauaagggacacgaa

SEQ ID NO: 759 - RNA, 20 nt, Artificial Sequence
  synthesized
gggcccauaagggacacgga

SEQ ID NO: 760 - RNA, 20 nt, Artificial Sequence
  synthesized
uaagggacacgaaucagauc

SEQ ID NO: 761 - RNA, 20 nt, Artificial Sequence
  synthesized
uaagggacacggaucagauc

SEQ ID NO: 762 - RNA, 20 nt, Artificial Sequence
  synthesized
uccgugucccuuaugggccc

SEQ ID NO: 763 - RNA, 20 nt, Artificial Sequence
  synthesized
ugaucugauccgugucccuu

SEQ ID NO: 764 - RNA, 20 nt, Artificial Sequence
  synthesized
ugaucugauucgugucccuu

SEQ ID NO: 765 - RNA, 20 nt, Artificial Sequence
  synthesized
uucgugucccuuaugggccc

SEQ ID NO: 766 - RNA, 20 nt, Artificial Sequence
  synthesized
agucaacaaacaccauucau

SEQ ID NO: 767 - RNA, 20 nt, Artificial Sequence
  synthesized
agucaauaaacaccauucau

SEQ ID NO: 768 - RNA, 20 nt, Artificial Sequence
  synthesized
caacaaacaccauucauggu

SEQ ID NO: 769 - RNA, 20 nt, Artificial Sequence
  synthesized
caauaaacaccauucauggu

SEQ ID NO: 770 - RNA, 20 nt, Artificial Sequence
  synthesized
cagucaacaaacaccauuca

SEQ ID NO: 771 - RNA, 20 nt, Artificial Sequence
  synthesized
cagucaauaaacaccauuca

SEQ ID NO: 772 - RNA, 20 nt, Artificial Sequence
  synthesized
caugaaugguguuuauugac

SEQ ID NO: 773 - RNA, 20 nt, Artificial Sequence
  synthesized
caugaaugguguuuguugac

SEQ ID NO: 774 - RNA, 20 nt, Artificial Sequence
  synthesized
ccaugaaugguguuuauuga

SEQ ID NO: 775 - RNA, 20 nt, Artificial Sequence
  synthesized
ccaugaaugguguuuguuga

SEQ ID NO: 776 - RNA, 20 nt, Artificial Sequence
  synthesized
cccucauauauucagucaac

SEQ ID NO: 777 - RNA, 20 nt, Artificial Sequence
  synthesized
cccucauauauucagucaau

SEQ ID NO: 778 - RNA, 20 nt, Artificial Sequence
  synthesized
guguuuguugacugaauaua

SEQ ID NO: 779 - RNA, 20 nt, Artificial Sequence
  synthesized
guuuguugacugaauauaug

SEQ ID NO: 780 - RNA, 20 nt, Artificial Sequence
  synthesized
ucaacaaacaccauucaugg

SEQ ID NO: 781 - RNA, 20 nt, Artificial Sequence
  synthesized
ucaauaaacaccauucaugg

SEQ ID NO: 782 - RNA, 20 nt, Artificial Sequence
  synthesized
ucaccaugaaugguguuuau

SEQ ID NO: 783 - RNA, 20 nt, Artificial Sequence
  synthesized
ucaccaugaaugguguuugu

SEQ ID NO: 784 - RNA, 20 nt, Artificial Sequence
  synthesized
agagguggaggagguagucc

SEQ ID NO: 785 - RNA, 20 nt, Artificial Sequence
  synthesized
aggagguaguccugggaaug

SEQ ID NO: 786 - RNA, 20 nt, Artificial Sequence
  synthesized
agguggaggagguaguccug

SEQ ID NO: 787 - RNA, 20 nt, Artificial Sequence
  synthesized
ccaggacuaccuccuccacc

SEQ ID NO: 788 - RNA, 20 nt, Artificial Sequence
  synthesized
cccauucccaggacuaccuc

SEQ ID NO: 789 - RNA, 20 nt, Artificial Sequence
  synthesized
gaggagguaguccugggaau

SEQ ID NO: 790 - RNA, 20 nt, Artificial Sequence
  synthesized
gagguaguccugggaauggg

SEQ ID NO: 791 - RNA, 20 nt, Artificial Sequence
  synthesized
gagguggaggagguaguccu

SEQ ID NO: 792 - RNA, 20 nt, Artificial Sequence
  synthesized
ggaggagguaguccugggaa

SEQ ID NO: 793 - RNA, 20 nt, Artificial Sequence
  synthesized
aaaaacaacugcuccauauc

SEQ ID NO: 794 - RNA, 20 nt, Artificial Sequence
  synthesized
agaaacaacugcuccauauc

SEQ ID NO: 795 - RNA, 20 nt, Artificial Sequence
  synthesized
agcaguuguuucucccuccc

SEQ ID NO: 796 - RNA, 20 nt, Artificial Sequence
  synthesized
agcaguuguuuuucccuccc

SEQ ID NO: 797 - RNA, 20 nt, Artificial Sequence
  synthesized
cagggagggaaaaacaacug

SEQ ID NO: 798 - RNA, 20 nt, Artificial Sequence
  synthesized
cagggagggagaaacaacug

SEQ ID NO: 799 - RNA, 20 nt, Artificial Sequence
  synthesized
gagcaguuguuucucccucc

SEQ ID NO: 800 - RNA, 20 nt, Artificial Sequence
  synthesized
gagcaguuguuuuucccucc

SEQ ID NO: 801 - RNA, 20 nt, Artificial Sequence
  synthesized
gcaguuguuucucccucccu

SEQ ID NO: 802 - RNA, 20 nt, Artificial Sequence
  synthesized
gcaguuguuuuucccucccu

SEQ ID NO: 803 - RNA, 20 nt, Artificial Sequence
  synthesized
acagaucugggaauccuggg

SEQ ID NO: 804 - RNA, 20 nt, Artificial Sequence
  synthesized
acagaugugggaauccuggg

SEQ ID NO: 805 - RNA, 20 nt, Artificial Sequence
  synthesized
agacagaucugggaauccug

SEQ ID NO: 806 - RNA, 20 nt, Artificial Sequence
  synthesized
agacagaugugggaauccug

SEQ ID NO: 807 - RNA, 20 nt, Artificial Sequence
  synthesized
agaucugggaauccugggug

SEQ ID NO: 808 - RNA, 20 nt, Artificial Sequence
  synthesized
agaugugggaauccugggug

SEQ ID NO: 809 - RNA, 20 nt, Artificial Sequence
  synthesized
auucccacaucugucugcuc

SEQ ID NO: 810 - RNA, 20 nt, Artificial Sequence
  synthesized
auucccagaucugucugcuc

SEQ ID NO: 811 - RNA, 20 nt, Artificial Sequence
  synthesized
cacaucugucugcucagaag

SEQ ID NO: 812 - RNA, 20 nt, Artificial Sequence
  synthesized
cagacagaucugggaauccu

SEQ ID NO: 813 - RNA, 20 nt, Artificial Sequence
  synthesized
cagacagaugugggaauccu

SEQ ID NO: 814 - RNA, 20 nt, Artificial Sequence
  synthesized
cagaucugggaauccugggu

SEQ ID NO: 815 - RNA, 20 nt, Artificial Sequence
  synthesized
cagaucugucugcucagaag

SEQ ID NO: 816 - RNA, 20 nt, Artificial Sequence
  synthesized
cagaugugggaauccugggu

SEQ ID NO: 817 - RNA, 20 nt, Artificial Sequence
  synthesized
cccacaucugucugcucaga

SEQ ID NO: 818 - RNA, 20 nt, Artificial Sequence
  synthesized
cccagaucugucugcucaga

SEQ ID NO: 819 - RNA, 20 nt, Artificial Sequence
  synthesized
cucuucugagcagacagauc

SEQ ID NO: 820 - RNA, 20 nt, Artificial Sequence
  synthesized
cucuucugagcagacagaug

SEQ ID NO: 821 - RNA, 20 nt, Artificial Sequence
  synthesized
cuucugagcagacagaucug

SEQ ID NO: 822 - RNA, 20 nt, Artificial Sequence
  synthesized
cuucugagcagacagaugug

SEQ ID NO: 823 - RNA, 20 nt, Artificial Sequence
  synthesized
gcagacagaucugggaaucc

SEQ ID NO: 824 - RNA, 20 nt, Artificial Sequence
  synthesized
gcagacagaugugggaaucc

SEQ ID NO: 825 - RNA, 20 nt, Artificial Sequence
  synthesized
ucugggaauccuggguggga

SEQ ID NO: 826 - RNA, 20 nt, Artificial Sequence
  synthesized
ucuucugagcagacagaucu

SEQ ID NO: 827 - RNA, 20 nt, Artificial Sequence
  synthesized
ucuucugagcagacagaugu

SEQ ID NO: 828 - RNA, 20 nt, Artificial Sequence
  synthesized
ugugggaauccuggguggga

SEQ ID NO: 829 - RNA, 20 nt, Artificial Sequence
  synthesized
cugagggagagcugggcaag

SEQ ID NO: 830 - RNA, 20 nt, Artificial Sequence
  synthesized
cugagggagagcugugcaag

SEQ ID NO: 831 - RNA, 20 nt, Artificial Sequence
  synthesized
gagggagagcugggcaagcc

SEQ ID NO: 832 - RNA, 20 nt, Artificial Sequence
  synthesized
gagggagagcugugcaagcc

SEQ ID NO: 833 - RNA, 20 nt, Artificial Sequence
  synthesized
ggcuugcacagcucucccuc

SEQ ID NO: 834 - RNA, 20 nt, Artificial Sequence
  synthesized
ggcuugcccagcucucccuc

SEQ ID NO: 835 - RNA, 20 nt, Artificial Sequence
  synthesized
gggcacugagggagagcugg

SEQ ID NO: 836 - RNA, 20 nt, Artificial Sequence
  synthesized
gggcacugagggagagcugu

SEQ ID NO: 837 - RNA, 20 nt, Artificial Sequence
  synthesized
ugcacagcucucccucagug

SEQ ID NO: 838 - RNA, 20 nt, Artificial Sequence
  synthesized
ugcccagcucucccucagug

SEQ ID NO: 839 - RNA, 20 nt, Artificial Sequence
  synthesized
aaaguugggguuuuucccau

SEQ ID NO: 840 - RNA, 20 nt, Artificial Sequence
  synthesized
aaguugggguuuuucccauu

SEQ ID NO: 841 - RNA, 20 nt, Artificial Sequence
  synthesized
aguccugggaaugggaaaaa

SEQ ID NO: 842 - RNA, 20 nt, Artificial Sequence
  synthesized
aguugggguuuuucccauuc

SEQ ID NO: 843 - RNA, 20 nt, Artificial Sequence
  synthesized
ccugggaaugggaaaaaccc

SEQ ID NO: 844 - RNA, 20 nt, Artificial Sequence
  synthesized
cugggaaugggaaaaacccc

SEQ ID NO: 845 - RNA, 20 nt, Artificial Sequence
  synthesized
gggaaugggaaaaaccccaa

SEQ ID NO: 846 - RNA, 20 nt, Artificial Sequence
  synthesized
gggguuuuucccauucccag

SEQ ID NO: 847 - RNA, 20 nt, Artificial Sequence
  synthesized
guccugggaaugggaaaaac

SEQ ID NO: 848 - RNA, 20 nt, Artificial Sequence
  synthesized
guugggguuuuucccauucc

SEQ ID NO: 849 - RNA, 20 nt, Artificial Sequence
  synthesized
uccugggaaugggaaaaacc

SEQ ID NO: 850 - RNA, 20 nt, Artificial Sequence
  synthesized
ugggaaugggaaaaacccca

SEQ ID NO: 851 - RNA, 20 nt, Artificial Sequence
  synthesized
cggugaaggccaaguuccca

SEQ ID NO: 852 - RNA, 20 nt, Artificial Sequence
  synthesized
gacggugaaggccaaguucc

SEQ ID NO: 853 - RNA, 20 nt, Artificial Sequence
  synthesized
ggacggugaaggccaaguuc

SEQ ID NO: 854 - RNA, 20 nt, Artificial Sequence
  synthesized
caggcccaaucucacccuca

SEQ ID NO: 855 - RNA, 20 nt, Artificial Sequence
  synthesized
ccaggcccaaucucacccuc

SEQ ID NO: 856 - RNA, 20 nt, Artificial Sequence
  synthesized
cccaggcccaaucucacccu

SEQ ID NO: 857 - RNA, 20 nt, Artificial Sequence
  synthesized
ccccaggcccaaucucaccc

SEQ ID NO: 858 - RNA, 20 nt, Artificial Sequence
  synthesized
aaguucccaaugagggugag

SEQ ID NO: 859 - RNA, 20 nt, Artificial Sequence
  synthesized
caaguucccaaugaggguga

SEQ ID NO: 860 - RNA, 20 nt, Artificial Sequence
  synthesized
caaucucacccucauuggga

SEQ ID NO: 861 - RNA, 20 nt, Artificial Sequence
  synthesized
caaugagggugagauugggc

SEQ ID NO: 862 - RNA, 20 nt, Artificial Sequence
  synthesized
ccaaucucacccucauuggg

SEQ ID NO: 863 - RNA, 20 nt, Artificial Sequence
  synthesized
ccaaugagggugagauuggg

SEQ ID NO: 864 - RNA, 20 nt, Artificial Sequence
  synthesized
cccaaucucacccucauugg

SEQ ID NO: 865 - RNA, 20 nt, Artificial Sequence
  synthesized
cccaaugagggugagauugg

SEQ ID NO: 866 - RNA, 20 nt, Artificial Sequence
  synthesized
ucccaaugagggugagauug

SEQ ID NO: 867 - RNA, 20 nt, Artificial Sequence
  synthesized
aguccugcuuccuuccccuc

SEQ ID NO: 868 - RNA, 20 nt, Artificial Sequence
  synthesized
cgucugagcaaacugaggcc

SEQ ID NO: 869 - RNA, 20 nt, Artificial Sequence
  synthesized
gguaguccugcuuccuuccc

SEQ ID NO: 870 - RNA, 20 nt, Artificial Sequence
  synthesized
guaguccugcuuccuucccc

SEQ ID NO: 871 - RNA, 20 nt, Artificial Sequence
  synthesized
agcccaaugucaaagucaga

SEQ ID NO: 872 - RNA, 20 nt, Artificial Sequence
  synthesized
caucccauucccgacuuggg

SEQ ID NO: 873 - RNA, 20 nt, Artificial Sequence
  synthesized
ccaaugucaaagucagaagg

SEQ ID NO: 874 - RNA, 20 nt, Artificial Sequence
  synthesized
ccaucccauucccgacuugg

SEQ ID NO: 875 - RNA, 20 nt, Artificial Sequence
  synthesized
cccaaugucaaagucagaag

SEQ ID NO: 876 - RNA, 20 nt, Artificial Sequence
  synthesized
gcccaucccauucccgacuu

SEQ ID NO: 877 - RNA, 20 nt, Artificial Sequence
  synthesized
cugugacucagguuggagug

SEQ ID NO: 878 - RNA, 20 nt, Artificial Sequence
  synthesized
gugacucagguuggagugca

SEQ ID NO: 879 - RNA, 20 nt, Artificial Sequence
  synthesized
agcauucuugggugggagca

SEQ ID NO: 880 - RNA, 20 nt, Artificial Sequence
  synthesized
cuguggcccuuguggcugac

SEQ ID NO: 881 - RNA, 20 nt, Artificial Sequence
  synthesized
gcauucuugggugggagcag

SEQ ID NO: 882 - RNA, 20 nt, Artificial Sequence
  synthesized
guggcccuuguggcugaccc

SEQ ID NO: 883 - RNA, 20 nt, Artificial Sequence
  synthesized
ccuaaucagccacgagggcc

SEQ ID NO: 884 - RNA, 20 nt, Artificial Sequence
  synthesized
gccuaaucagccacgagggc

SEQ ID NO: 885 - RNA, 20 nt, Artificial Sequence
  synthesized
ggccaccugguacauggcau

SEQ ID NO: 886 - RNA, 20 nt, Artificial Sequence
  synthesized
gggccaccugguacauggca

SEQ ID NO: 887 - RNA, 20 nt, Artificial Sequence
  synthesized
ggggccaccugguacauggc

SEQ ID NO: 888 - RNA, 20 nt, Artificial Sequence
  synthesized
uaaucagccacgagggccuc

SEQ ID NO: 889 - RNA, 20 nt, Artificial Sequence
  synthesized
aauccugggugggaagagag

SEQ ID NO: 890 - RNA, 20 nt, Artificial Sequence
  synthesized
aucccuuaaucucucucuca

SEQ ID NO: 891 - RNA, 20 nt, Artificial Sequence
  synthesized
gaauccugggugggaagaga

SEQ ID NO: 892 - RNA, 20 nt, Artificial Sequence
  synthesized
uaucccuuaaucucucucuc

SEQ ID NO: 893 - RNA, 20 nt, Artificial Sequence
  synthesized
ucccuuaaucucucucucac

SEQ ID NO: 894 - RNA, 20 nt, Artificial Sequence
  synthesized
aagcagauuccguccagggu

SEQ ID NO: 895 - RNA, 20 nt, Artificial Sequence
  synthesized
agaagcagauuccguccagg

SEQ ID NO: 896 - RNA, 20 nt, Artificial Sequence
  synthesized
agcagauuccguccagggug

SEQ ID NO: 897 - RNA, 20 nt, Artificial Sequence
  synthesized
ccugucuccacaaccucaca

SEQ ID NO: 898 - RNA, 20 nt, Artificial Sequence
  synthesized
cugucuccacaaccucacag

SEQ ID NO: 899 - RNA, 20 nt, Artificial Sequence
  synthesized
gcccugucuccacaaccuca

SEQ ID NO: 900 - RNA, 20 nt, Artificial Sequence
  synthesized
acgagaggccccaucccacc

SEQ ID NO: 901 - RNA, 20 nt, Artificial Sequence
  synthesized
cacguggcagggcuaaggca

SEQ ID NO: 902 - RNA, 20 nt, Artificial Sequence
  synthesized
cgagaggccccaucccaccc

SEQ ID NO: 903 - RNA, 20 nt, Artificial Sequence
  synthesized
cguggcagggcuaaggcagg

SEQ ID NO: 904 - RNA, 20 nt, Artificial Sequence
  synthesized
cuacgagaggccccauccca

SEQ ID NO: 905 - RNA, 20 nt, Artificial Sequence
  synthesized
uacgagaggccccaucccac

SEQ ID NO: 906 - RNA, 20 nt, Artificial Sequence
  synthesized
aggggcacacaucccgcugg

SEQ ID NO: 907 - RNA, 20 nt, Artificial Sequence
  synthesized
gaucuggagucccacguucc

SEQ ID NO: 908 - RNA, 20 nt, Artificial Sequence
  synthesized
gggcacacaucccgcuggcc

SEQ ID NO: 909 - RNA, 20 nt, Artificial Sequence
  synthesized
ggggcacacaucccgcuggc

SEQ ID NO: 910 - RNA, 20 nt, Artificial Sequence
  synthesized
ucuggagucccacguucccc

SEQ ID NO: 911 - RNA, 20 nt, Artificial Sequence
  synthesized
ugaucuggagucccacguuc

SEQ ID NO: 912 - RNA, 20 nt, Artificial Sequence
  synthesized
aggggugagaccccaggccc

SEQ ID NO: 913 - RNA, 20 nt, Artificial Sequence
  synthesized
cuaggggugagaccccaggc

SEQ ID NO: 914 - RNA, 20 nt, Artificial Sequence
  synthesized
ggccauauuguggccccuug

SEQ ID NO: 915 - RNA, 20 nt, Artificial Sequence
  synthesized
gguggccauauuguggcccc

SEQ ID NO: 916 - RNA, 20 nt, Artificial Sequence
  synthesized
agaggcugagugggacccag

SEQ ID NO: 917 - RNA, 20 nt, Artificial Sequence
  synthesized
aggcugagugggacccaguu

SEQ ID NO: 918 - RNA, 20 nt, Artificial Sequence
  synthesized
gaggcugagugggacccagu

SEQ ID NO: 919 - RNA, 20 nt, Artificial Sequence
  synthesized
uagaggcugagugggaccca

SEQ ID NO: 920 - RNA, 20 nt, Artificial Sequence
  synthesized
cccuuggaacugggucccac

SEQ ID NO: 921 - RNA, 20 nt, Artificial Sequence
  synthesized
ccuuggaacugggucccacu

SEQ ID NO: 922 - RNA, 20 nt, Artificial Sequence
  synthesized
gccccuuggaacuggguccc

SEQ ID NO: 923 - RNA, 20 nt, Artificial Sequence
  synthesized
cuuggaacugggucccacuc

SEQ ID NO: 924 - RNA, 20 nt, Artificial Sequence
  synthesized
gaacugggucccacucagcc

SEQ ID NO: 925 - RNA, 20 nt, Artificial Sequence
  synthesized
gcugagugggacccaguucc

SEQ ID NO: 926 - RNA, 20 nt, Artificial Sequence
  synthesized
ggaacugggucccacucagc

SEQ ID NO: 927 - RNA, 20 nt, Artificial Sequence
  synthesized
ggcugagugggacccaguuc

SEQ ID NO: 928 - RNA, 20 nt, Artificial Sequence
  synthesized
uggaacugggucccacucag

SEQ ID NO: 929 - RNA, 20 nt, Artificial Sequence
  synthesized
uuggaacugggucccacuca

SEQ ID NO: 930 - RNA, 20 nt, Artificial Sequence
  synthesized
acuguccccacugugucuca

SEQ ID NO: 931 - RNA, 20 nt, Artificial Sequence
  synthesized
gauugucuccuaauggggcu

SEQ ID NO: 932 - RNA, 20 nt, Artificial Sequence
  synthesized
gcgauugucuccuaaugggg

SEQ ID NO: 933 - RNA, 20 nt, Artificial Sequence
  synthesized
ggcgauugucuccuaauggg

SEQ ID NO: 934 - RNA, 20 nt, Artificial Sequence
  synthesized
guccccacugugucucaucu

SEQ ID NO: 935 - RNA, 20 nt, Artificial Sequence
  synthesized
uguccccacugugucucauc

SEQ ID NO: 936 - RNA, 20 nt, Artificial Sequence
  synthesized
agccugggucugucuugcuc

SEQ ID NO: 937 - RNA, 20 nt, Artificial Sequence
  synthesized
augcuggucucugggaaccc

SEQ ID NO: 938 - RNA, 20 nt, Artificial Sequence
  synthesized
caugcuggucucugggaacc

SEQ ID NO: 939 - RNA, 20 nt, Artificial Sequence
  synthesized
ccugggucugucuugcucac

SEQ ID NO: 940 - RNA, 20 nt, Artificial Sequence
  synthesized
cugggucugucuugcucaca

SEQ ID NO: 941 - RNA, 20 nt, Artificial Sequence
  synthesized
gccugggucugucuugcuca

SEQ ID NO: 942 - RNA, 20 nt, Artificial Sequence
  synthesized
gcuggucucugggaacccug

SEQ ID NO: 943 - RNA, 20 nt, Artificial Sequence
  synthesized
ugcuggucucugggaacccu

SEQ ID NO: 944 - RNA, 20 nt, Artificial Sequence
  synthesized
agaagcacuaugcaaaaagc

SEQ ID NO: 945 - RNA, 20 nt, Artificial Sequence
  synthesized
agcacuaugcaaaaagcaag

SEQ ID NO: 946 - RNA, 20 nt, Artificial Sequence
  synthesized
acagcuuagcaguaccucag

SEQ ID NO: 947 - RNA, 20 nt, Artificial Sequence
  synthesized
agcuuagcaguaccucagca

SEQ ID NO: 948 - RNA, 20 nt, Artificial Sequence
  synthesized
cacagcuuagcaguaccuca

SEQ ID NO: 949 - RNA, 20 nt, Artificial Sequence
  synthesized
cagcuuagcaguaccucagc

SEQ ID NO: 950 - RNA, 20 nt, Artificial Sequence
  synthesized
aaaaagcaagaugcugaggu

SEQ ID NO: 951 - RNA, 20 nt, Artificial Sequence
  synthesized
caaaaagcaagaugcugagg

SEQ ID NO: 952 - RNA, 20 nt, Artificial Sequence
  synthesized
gcaaaaagcaagaugcugag

SEQ ID NO: 953 - RNA, 20 nt, Artificial Sequence
  synthesized
ugcaaaaagcaagaugcuga

SEQ ID NO: 954 - RNA, 20 nt, Artificial Sequence
  synthesized
aaaagcaagaugcugaggua

SEQ ID NO: 955 - RNA, 20 nt, Artificial Sequence
  synthesized
aaagcaagaugcugagguac

SEQ ID NO: 956 - RNA, 20 nt, Artificial Sequence
  synthesized
aagaugcugagguacugcua

SEQ ID NO: 957 - RNA, 20 nt, Artificial Sequence
  synthesized
aagcaagaugcugagguacu

SEQ ID NO: 958 - RNA, 20 nt, Artificial Sequence
  synthesized
agaugcugagguacugcuaa

SEQ ID NO: 959 - RNA, 20 nt, Artificial Sequence
  synthesized
agcaagaugcugagguacug

SEQ ID NO: 960 - RNA, 20 nt, Artificial Sequence
  synthesized
agcaguaccucagcaucuug

SEQ ID NO: 961 - RNA, 20 nt, Artificial Sequence
  synthesized
aguaccucagcaucuugcuu

SEQ ID NO: 962 - RNA, 20 nt, Artificial Sequence
  synthesized
caagaugcugagguacugcu

SEQ ID NO: 963 - RNA, 20 nt, Artificial Sequence
  synthesized
caguaccucagcaucuugcu

SEQ ID NO: 964 - RNA, 20 nt, Artificial Sequence
  synthesized
cuuagcaguaccucagcauc

SEQ ID NO: 965 - RNA, 20 nt, Artificial Sequence
  synthesized
gaugcugagguacugcuaag

SEQ ID NO: 966 - RNA, 20 nt, Artificial Sequence
  synthesized
gcaagaugcugagguacugc

SEQ ID NO: 967 - RNA, 20 nt, Artificial Sequence
  synthesized
gcaguaccucagcaucuugc

SEQ ID NO: 968 - RNA, 20 nt, Artificial Sequence
  synthesized
gcuuagcaguaccucagcau

SEQ ID NO: 969 - RNA, 20 nt, Artificial Sequence
  synthesized
uaccucagcaucuugcuuuu

SEQ ID NO: 970 - RNA, 20 nt, Artificial Sequence
  synthesized
uagcaguaccucagcaucuu

SEQ ID NO: 971 - RNA, 20 nt, Artificial Sequence
  synthesized
uuagcaguaccucagcaucu

SEQ ID NO: 972 - RNA, 20 nt, Artificial Sequence
  synthesized
cuccccaccuccucaccaac

SEQ ID NO: 973 - RNA, 20 nt, Artificial Sequence
  synthesized
cucuccccaccuccucacca

SEQ ID NO: 974 - RNA, 20 nt, Artificial Sequence
  synthesized
gcucuccccaccuccucacc

SEQ ID NO: 975 - RNA, 20 nt, Artificial Sequence
  synthesized
ggcuagggcuaugccacgca

SEQ ID NO: 976 - RNA, 20 nt, Artificial Sequence
  synthesized
uagggcuaugccacgcagag

SEQ ID NO: 977 - RNA, 20 nt, Artificial Sequence
  synthesized
ucuccccaccuccucaccaa

SEQ ID NO: 978 - RNA, 20 nt, Artificial Sequence
  synthesized
aggccgcccaccccccggcc

SEQ ID NO: 979 - RNA, 20 nt, Artificial Sequence
  synthesized
cgucuucaccgucaaggagg

SEQ ID NO: 980 - RNA, 20 nt, Artificial Sequence
  synthesized
gaggccgcccaccccccggc

SEQ ID NO: 981 - RNA, 20 nt, Artificial Sequence
  synthesized
ggccgcccaccccccggccc

SEQ ID NO: 982 - RNA, 20 nt, Artificial Sequence
  synthesized
ucgucuucaccgucaaggag

SEQ ID NO: 983 - RNA, 20 nt, Artificial Sequence
  synthesized
ugaggccgcccaccccccgg

SEQ ID NO: 984 - RNA, 20 nt, Artificial Sequence
  synthesized
ccgacuauaggcgucuccca

SEQ ID NO: 985 - RNA, 20 nt, Artificial Sequence
  synthesized
cgacuauaggcgucucccau

SEQ ID NO: 986 - RNA, 20 nt, Artificial Sequence
  synthesized
gccgacuauaggcgucuccc

SEQ ID NO: 987 - RNA, 20 nt, Artificial Sequence
  synthesized
ggccgacuauaggcgucucc

SEQ ID NO: 988 - RNA, 20 nt, Artificial Sequence
  synthesized
ggcugggggaagguguaggg

SEQ ID NO: 989 - RNA, 20 nt, Artificial Sequence
  synthesized
aguuggaagcccgcaucuau

SEQ ID NO: 990 - RNA, 20 nt, Artificial Sequence
  synthesized
cuuggugcugcaaacauggc

SEQ ID NO: 991 - RNA, 20 nt, Artificial Sequence
  synthesized
gaguuggaagcccgcaucua

SEQ ID NO: 992 - RNA, 20 nt, Artificial Sequence
  synthesized
gcuuggugcugcaaacaugg

SEQ ID NO: 993 - RNA, 20 nt, Artificial Sequence
  synthesized
uggugcugcaaacauggccc

SEQ ID NO: 994 - RNA, 20 nt, Artificial Sequence
  synthesized
gaguggcugagcucaggccu

SEQ ID NO: 995 - RNA, 20 nt, Artificial Sequence
  synthesized
gcugcucccacccaagaaug

SEQ ID NO: 996 - RNA, 20 nt, Artificial Sequence
  synthesized
guggcugagcucaggccuuc

SEQ ID NO: 997 - RNA, 20 nt, Artificial Sequence
  synthesized
ugaguggcugagcucaggcc

SEQ ID NO: 998 - RNA, 20 nt, Artificial Sequence
  synthesized
ugcucccacccaagaaugcu

SEQ ID NO: 999 - RNA, 20 nt, Artificial Sequence
  synthesized
aacagccaucacugagguga

SEQ ID NO: 1000 - RNA, 20 nt, Artificial Sequence
  synthesized
aagcuuuacagaauaaagag

SEQ ID NO: 1001 - RNA, 20 nt, Artificial Sequence
  synthesized
agcuuuacagaauaaagagc

SEQ ID NO: 1002 - RNA, 20 nt, Artificial Sequence
  synthesized
caagcuuuacagaauaaaga

SEQ ID NO: 1003 - RNA, 20 nt, Artificial Sequence
  synthesized
cagccaucacugaggugaca

SEQ ID NO: 1004 - RNA, 20 nt, Artificial Sequence
  synthesized
gcuuuacagaauaaagagca

SEQ ID NO: 1005 - RNA, 20 nt, Artificial Sequence
  synthesized
uaacagccaucacugaggug

SEQ ID NO: 1006 - RNA, 20 nt, Artificial Sequence
  synthesized
aggagacaaucgccuagagg

SEQ ID NO: 1007 - RNA, 20 nt, Artificial Sequence
  synthesized
gagacaaucgccuagaggcu

SEQ ID NO: 1008 - RNA, 20 nt, Artificial Sequence
  synthesized
uaggagacaaucgccuagag

SEQ ID NO: 1009 - RNA, 20 nt, Artificial Sequence
  synthesized
acacugugggcagcccuggc

SEQ ID NO: 1010 - RNA, 20 nt, Artificial Sequence
  synthesized
acuggaaggcaagaggcuug

SEQ ID NO: 1011 - RNA, 20 nt, Artificial Sequence
  synthesized
cacugugggcagcccuggcc

SEQ ID NO: 1012 - RNA, 20 nt, Artificial Sequence
  synthesized
cuggaaggcaagaggcuuga

SEQ ID NO: 1013 - RNA, 20 nt, Artificial Sequence
  synthesized
cugugggcagcccuggcccu

SEQ ID NO: 1014 - RNA, 20 nt, Artificial Sequence
  synthesized
uggaaggcaagaggcuugag

SEQ ID NO: 1015 - RNA, 20 nt, Artificial Sequence
  synthesized
caaacacccaacaauggcca

SEQ ID NO: 1016 - RNA, 20 nt, Artificial Sequence
  synthesized
cggucccauucucagggaau

SEQ ID NO: 1017 - RNA, 20 nt, Artificial Sequence
  synthesized
cucggucccauucucaggga

SEQ ID NO: 1018 - RNA, 20 nt, Artificial Sequence
  synthesized
ucggucccauucucagggaa

SEQ ID NO: 1019 - RNA, 20 nt, Artificial Sequence
  synthesized
auauuuguaaacugggacug

SEQ ID NO: 1020 - RNA, 20 nt, Artificial Sequence
  synthesized
auuuguaaacugggacugac

SEQ ID NO: 1021 - RNA, 20 nt, Artificial Sequence
  synthesized
cuuacgggugguuguucucu

SEQ ID NO: 1022 - RNA, 20 nt, Artificial Sequence
  synthesized
uauuuguaaacugggacuga

SEQ ID NO: 1023 - RNA, 20 nt, Artificial Sequence
  synthesized
uuuguaaacugggacugacc

SEQ ID NO: 1024 - RNA, 20 nt, Artificial Sequence
  synthesized
caucccacacagcuuagcag

SEQ ID NO: 1025 - RNA, 20 nt, Artificial Sequence
  synthesized
ccaucccacacagcuuagca

SEQ ID NO: 1026 - RNA, 20 nt, Artificial Sequence
  synthesized
acucaggguagggguguagg

SEQ ID NO: 1027 - RNA, 20 nt, Artificial Sequence
  synthesized
auuagagucuguuucuucuu

SEQ ID NO: 1028 - RNA, 20 nt, Artificial Sequence
  synthesized
cauuagagucuguuucuucu

SEQ ID NO: 1029 - RNA, 20 nt, Artificial Sequence
  synthesized
uuagagucuguuucuucuuc

SEQ ID NO: 1030 - RNA, 20 nt, Artificial Sequence
  synthesized
cuugcuuucuggaaaagugu

SEQ ID NO: 1031 - RNA, 20 nt, Artificial Sequence
  synthesized
gcuagacacuuaucccuaag

SEQ ID NO: 1032 - RNA, 20 nt, Artificial Sequence
  synthesized
ucuugcuuucuggaaaagug

SEQ ID NO: 1033 - RNA, 20 nt, Artificial Sequence
  synthesized
uucuugcuuucuggaaaagu

SEQ ID NO: 1034 - RNA, 20 nt, Artificial Sequence
  synthesized
uugcuuucuggaaaaguguc

SEQ ID NO: 1035 - RNA, 20 nt, Artificial Sequence
  synthesized
aagcuugacgaagaaaaaaa

SEQ ID NO: 1036 - RNA, 20 nt, Artificial Sequence
  synthesized
acagagaccuugucucaaaa

SEQ ID NO: 1037 - RNA, 20 nt, Artificial Sequence
  synthesized
agcuugacgaagaaaaaaaa

SEQ ID NO: 1038 - RNA, 20 nt, Artificial Sequence
  synthesized
cgacagagaccuugucucaa

SEQ ID NO: 1039 - RNA, 20 nt, Artificial Sequence
  synthesized
gacagagaccuugucucaaa

SEQ ID NO: 1040 - RNA, 20 nt, Artificial Sequence
  synthesized
gcuugacgaagaaaaaaaaa

SEQ ID NO: 1041 - RNA, 20 nt, Artificial Sequence
  synthesized
acaguggacgggccucagga

SEQ ID NO: 1042 - RNA, 20 nt, Artificial Sequence
  synthesized
agagccgcuggacgcucugg

SEQ ID NO: 1043 - RNA, 20 nt, Artificial Sequence
  synthesized
aguggacgggccucaggaaa

SEQ ID NO: 1044 - RNA, 20 nt, Artificial Sequence
  synthesized
cagagccgcuggacgcucug

SEQ ID NO: 1045 - RNA, 20 nt, Artificial Sequence
  synthesized
caguggacgggccucaggaa

SEQ ID NO: 1046 - RNA, 20 nt, Artificial Sequence
  synthesized
gacaguggacgggccucagg

SEQ ID NO: 1047 - RNA, 20 nt, Artificial Sequence
  synthesized
aauccugacccccugaucug

SEQ ID NO: 1048 - RNA, 20 nt, Artificial Sequence
  synthesized
auccugacccccugaucuga

SEQ ID NO: 1049 - RNA, 20 nt, Artificial Sequence
  synthesized
caauccugacccccugaucu

SEQ ID NO: 1050 - RNA, 20 nt, Artificial Sequence
  synthesized
cugggcccauaagggacacg

SEQ ID NO: 1051 - RNA, 20 nt, Artificial Sequence
  synthesized
uccugacccccugaucugau

SEQ ID NO: 1052 - RNA, 20 nt, Artificial Sequence
  synthesized
aaagcccucauauauucagu

SEQ ID NO: 1053 - RNA, 20 nt, Artificial Sequence
  synthesized
aagcccucauauauucaguc

SEQ ID NO: 1054 - RNA, 20 nt, Artificial Sequence
  synthesized
cuaucaccaugaaugguguu

SEQ ID NO: 1055 - RNA, 20 nt, Artificial Sequence
  synthesized
gcccucauauauucagucaa

SEQ ID NO: 1056 - RNA, 20 nt, Artificial Sequence
  synthesized
gcuaucaccaugaauggugu

SEQ ID NO: 1057 - RNA, 20 nt, Artificial Sequence
  synthesized
ggcuaucaccaugaauggug

SEQ ID NO: 1058 - RNA, 20 nt, Artificial Sequence
  synthesized
uaucaccaugaaugguguuu

SEQ ID NO: 1059 - RNA, 20 nt, Artificial Sequence
  synthesized
augcauucuucugcuaaaca

SEQ ID NO: 1060 - RNA, 20 nt, Artificial Sequence
  synthesized
auuaggaugcauucuucugc

SEQ ID NO: 1061 - RNA, 20 nt, Artificial Sequence
  synthesized
auucuucugcuaaacacaca

SEQ ID NO: 1062 - RNA, 20 nt, Artificial Sequence
  synthesized
cugcuaaacacacacacaca

SEQ ID NO: 1063 - RNA, 20 nt, Artificial Sequence
  synthesized
gcauucuucugcuaaacaca

SEQ ID NO: 1064 - RNA, 20 nt, Artificial Sequence
  synthesized
ggaugcauucuucugcuaaa

SEQ ID NO: 1065 - RNA, 20 nt, Artificial Sequence
  synthesized
guguguguguguguguuuag

SEQ ID NO: 1066 - RNA, 20 nt, Artificial Sequence
  synthesized
guguguguguguguuuagca

SEQ ID NO: 1067 - RNA, 20 nt, Artificial Sequence
  synthesized
guguguguguuuagcagaag

SEQ ID NO: 1068 - RNA, 20 nt, Artificial Sequence
  synthesized
guguuuagcagaagaaugca

SEQ ID NO: 1069 - RNA, 20 nt, Artificial Sequence
  synthesized
guuuagcagaagaaugcauc

SEQ ID NO: 1070 - RNA, 20 nt, Artificial Sequence
  synthesized
uaggaugcauucuucugcua

SEQ ID NO: 1071 - RNA, 20 nt, Artificial Sequence
  synthesized
ucuucugcuaaacacacaca

SEQ ID NO: 1072 - RNA, 20 nt, Artificial Sequence
  synthesized
uguguguguguguguguuua

SEQ ID NO: 1073 - RNA, 20 nt, Artificial Sequence
  synthesized
uguguguguguguuuagcag

SEQ ID NO: 1074 - RNA, 20 nt, Artificial Sequence
  synthesized
uguguguguguuuagcagaa

SEQ ID NO: 1075 - RNA, 20 nt, Artificial Sequence
  synthesized
uguguguuuagcagaagaau

SEQ ID NO: 1076 - RNA, 20 nt, Artificial Sequence
  synthesized
uguguuuagcagaagaaugc

SEQ ID NO: 1077 - RNA, 20 nt, Artificial Sequence
  synthesized
uguuuagcagaagaaugcau

SEQ ID NO: 1078 - RNA, 20 nt, Artificial Sequence
  synthesized
uuagcagaagaaugcauccu

SEQ ID NO: 1079 - RNA, 20 nt, Artificial Sequence
  synthesized
uucugcuaaacacacacaca

SEQ ID NO: 1080 - RNA, 20 nt, Artificial Sequence
  synthesized
uuuagcagaagaaugcaucc

SEQ ID NO: 1081 - RNA, 20 nt, Artificial Sequence
  synthesized
aggcaguccugggaauggga

SEQ ID NO: 1082 - RNA, 20 nt, Artificial Sequence
  synthesized
auucccaggacugccuccuc

SEQ ID NO: 1083 - RNA, 20 nt, Artificial Sequence
  synthesized
caggacugccuccuccaccu

SEQ ID NO: 1084 - RNA, 20 nt, Artificial Sequence
  synthesized
caguccugggaaugggaaaa

SEQ ID NO: 1085 - RNA, 20 nt, Artificial Sequence
  synthesized
cauucccaggacugccuccu

SEQ ID NO: 1086 - RNA, 20 nt, Artificial Sequence
  synthesized
ccauucccaggacugccucc

SEQ ID NO: 1087 - RNA, 20 nt, Artificial Sequence
  synthesized
cccaggacugccuccuccac

SEQ ID NO: 1088 - RNA, 20 nt, Artificial Sequence
  synthesized
cuagagguggaggaggcagu

SEQ ID NO: 1089 - RNA, 20 nt, Artificial Sequence
  synthesized
gcaguccugggaaugggaaa

SEQ ID NO: 1090 - RNA, 20 nt, Artificial Sequence
  synthesized
ggaggcaguccugggaaugg

SEQ ID NO: 1091 - RNA, 20 nt, Artificial Sequence
  synthesized
ggcaguccugggaaugggaa

SEQ ID NO: 1092 - RNA, 20 nt, Artificial Sequence
  synthesized
gguggaggaggcaguccugg

SEQ ID NO: 1093 - RNA, 20 nt, Artificial Sequence
  synthesized
guggaggaggcaguccuggg

SEQ ID NO: 1094 - RNA, 20 nt, Artificial Sequence
  synthesized
uagagguggaggaggcaguc

SEQ ID NO: 1095 - RNA, 20 nt, Artificial Sequence
  synthesized
ucccaggacugccuccucca

SEQ ID NO: 1096 - RNA, 20 nt, Artificial Sequence
  synthesized
ucccauucccaggacugccu

SEQ ID NO: 1097 - RNA, 20 nt, Artificial Sequence
  synthesized
uggaggaggcaguccuggga

SEQ ID NO: 1098 - RNA, 20 nt, Artificial Sequence
  synthesized
uucccaggacugccuccucc

SEQ ID NO: 1099 - RNA, 20 nt, Artificial Sequence
  synthesized
uucccauucccaggacugcc

SEQ ID NO: 1100 - RNA, 20 nt, Artificial Sequence
  synthesized
uuucccauucccaggacugc

SEQ ID NO: 1101 - RNA, 20 nt, Artificial Sequence
  synthesized
uuuucccauucccaggacug

SEQ ID NO: 1102 - RNA, 20 nt, Artificial Sequence
  synthesized
ggguuuuucccauucccagg

SEQ ID NO: 1103 - RNA, 20 nt, Artificial Sequence
  synthesized
gguuuuucccauucccagga

SEQ ID NO: 1104 - RNA, 20 nt, Artificial Sequence
  synthesized
guuuuucccauucccaggac

SEQ ID NO: 1105 - RNA, 20 nt, Artificial Sequence
  synthesized
uuuuucccauucccaggacu

SEQ ID NO: 1106 - RNA, 20 nt, Artificial Sequence
  synthesized
ccuggggcuagagguggagg

SEQ ID NO: 1107 - RNA, 20 nt, Artificial Sequence
  synthesized
ggggcuagagguggaggagg

SEQ ID NO: 1108 - RNA, 20 nt, Artificial Sequence
  synthesized
uggggcuagagguggaggag

SEQ ID NO: 1109 - RNA, 20 nt, Artificial Sequence
  synthesized
aagugaggcccagggaggga

SEQ ID NO: 1110 - RNA, 20 nt, Artificial Sequence
  synthesized
aaugauauggagcaguuguu

SEQ ID NO: 1111 - RNA, 20 nt, Artificial Sequence
  synthesized
augauauggagcaguuguuu

SEQ ID NO: 1112 - RNA, 20 nt, Artificial Sequence
  synthesized
cuaaugauauggagcaguug

SEQ ID NO: 1113 - RNA, 20 nt, Artificial Sequence
  synthesized
gaaagugaggcccagggagg

SEQ ID NO: 1114 - RNA, 20 nt, Artificial Sequence
  synthesized
acucuucugagcagacagau

SEQ ID NO: 1115 - RNA, 20 nt, Artificial Sequence
  synthesized
cucuucccacccaggauucc

SEQ ID NO: 1116 - RNA, 20 nt, Artificial Sequence
  synthesized
cuucccacccaggauuccca

SEQ ID NO: 1117 - RNA, 20 nt, Artificial Sequence
  synthesized
gcacucuucugagcagacag

SEQ ID NO: 1118 - RNA, 20 nt, Artificial Sequence
  synthesized
ggcacucuucugagcagaca

SEQ ID NO: 1119 - RNA, 20 nt, Artificial Sequence
  synthesized
agagaggaggggucuggcuu

SEQ ID NO: 1120 - RNA, 20 nt, Artificial Sequence
  synthesized
agaggaggggucuggcuugc

SEQ ID NO: 1121 - RNA, 20 nt, Artificial Sequence
  synthesized
cagagaggaggggucuggcu

SEQ ID NO: 1122 - RNA, 20 nt, Artificial Sequence
  synthesized
gagaggaggggucuggcuug

SEQ ID NO: 1123 - RNA, 20 nt, Artificial Sequence
  synthesized
ugggcacugagggagagcug

SEQ ID NO: 1124 - RNA, 20 nt, Artificial Sequence
  synthesized
aaguucccagugagggugag

SEQ ID NO: 1125 - RNA, 20 nt, Artificial Sequence
  synthesized
acugggaacuuggccuucac

SEQ ID NO: 1126 - RNA, 20 nt, Artificial Sequence
  synthesized
aucucacccucacugggaac

SEQ ID NO: 1127 - RNA, 20 nt, Artificial Sequence
  synthesized
aucucacccucauugggaac

SEQ ID NO: 1128 - RNA, 20 nt, Artificial Sequence
  synthesized
auugggaacuuggccuucac

SEQ ID NO: 1129 - RNA, 20 nt, Artificial Sequence
  synthesized
caaguucccagugaggguga

SEQ ID NO: 1130 - RNA, 20 nt, Artificial Sequence
  synthesized
caaucucacccucacuggga

SEQ ID NO: 1131 - RNA, 20 nt, Artificial Sequence
  synthesized
cacccucacugggaacuugg

SEQ ID NO: 1132 - RNA, 20 nt, Artificial Sequence
  synthesized
cacccucauugggaacuugg

SEQ ID NO: 1133 - RNA, 20 nt, Artificial Sequence
  synthesized
cacugggaacuuggccuuca

SEQ ID NO: 1134 - RNA, 20 nt, Artificial Sequence
  synthesized
cagugagggugagauugggc

SEQ ID NO: 1135 - RNA, 20 nt, Artificial Sequence
  synthesized
cauugggaacuuggccuuca

SEQ ID NO: 1136 - RNA, 20 nt, Artificial Sequence
  synthesized
ccaaucucacccucacuggg

SEQ ID NO: 1137 - RNA, 20 nt, Artificial Sequence
  synthesized
ccagugagggugagauuggg

SEQ ID NO: 1138 - RNA, 20 nt, Artificial Sequence
  synthesized
cccaaucucacccucacugg

SEQ ID NO: 1139 - RNA, 20 nt, Artificial Sequence
  synthesized
cccagugagggugagauugg

SEQ ID NO: 1140 - RNA, 20 nt, Artificial Sequence
  synthesized
cccucacugggaacuuggcc

SEQ ID NO: 1141 - RNA, 20 nt, Artificial Sequence
  synthesized
cccucauugggaacuuggcc

SEQ ID NO: 1142 - RNA, 20 nt, Artificial Sequence
  synthesized
ccucacugggaacuuggccu

SEQ ID NO: 1143 - RNA, 20 nt, Artificial Sequence
  synthesized
ccucauugggaacuuggccu

SEQ ID NO: 1144 - RNA, 20 nt, Artificial Sequence
  synthesized
cucacccucacugggaacuu

SEQ ID NO: 1145 - RNA, 20 nt, Artificial Sequence
  synthesized
cucacccucauugggaacuu

SEQ ID NO: 1146 - RNA, 20 nt, Artificial Sequence
  synthesized
cugggaacuuggccuucacc

SEQ ID NO: 1147 - RNA, 20 nt, Artificial Sequence
  synthesized
gccaaguucccaaugagggu

SEQ ID NO: 1148 - RNA, 20 nt, Artificial Sequence
  synthesized
gccaaguucccagugagggu

SEQ ID NO: 1149 - RNA, 20 nt, Artificial Sequence
  synthesized
gugaaggccaaguucccaau

SEQ ID NO: 1150 - RNA, 20 nt, Artificial Sequence
  synthesized
gugaaggccaaguucccagu

SEQ ID NO: 1151 - RNA, 20 nt, Artificial Sequence
  synthesized
ucacccucacugggaacuug

SEQ ID NO: 1152 - RNA, 20 nt, Artificial Sequence
  synthesized
ucacccucauugggaacuug

SEQ ID NO: 1153 - RNA, 20 nt, Artificial Sequence
  synthesized
ucacugggaacuuggccuuc

SEQ ID NO: 1154 - RNA, 20 nt, Artificial Sequence
  synthesized
ucauugggaacuuggccuuc

SEQ ID NO: 1155 - RNA, 20 nt, Artificial Sequence
  synthesized
ucccagugagggugagauug

SEQ ID NO: 1156 - RNA, 20 nt, Artificial Sequence
  synthesized
uugggaacuuggccuucacc

SEQ ID NO: 1157 - RNA, 20 nt, Artificial Sequence
  synthesized
aaacugaggcccagggaggg

SEQ ID NO: 1158 - RNA, 20 nt, Artificial Sequence
  synthesized
agagaggggaaggaagcagg

SEQ ID NO: 1159 - RNA, 20 nt, Artificial Sequence
  synthesized
agaggggaaggaagcaggac

SEQ ID NO: 1160 - RNA, 20 nt, Artificial Sequence
  synthesized
aggcccagggaggggaagga

SEQ ID NO: 1161 - RNA, 20 nt, Artificial Sequence
  synthesized
agggaggggaaggaagcagg

SEQ ID NO: 1162 - RNA, 20 nt, Artificial Sequence
  synthesized
cagagaggggaaggaagcag

SEQ ID NO: 1163 - RNA, 20 nt, Artificial Sequence
  synthesized
cagggaggggaaggaagcag

SEQ ID NO: 1164 - RNA, 20 nt, Artificial Sequence
  synthesized
ccccucccugggccucaguu

SEQ ID NO: 1165 - RNA, 20 nt, Artificial Sequence
  synthesized
cccucccugggccucaguuu

SEQ ID NO: 1166 - RNA, 20 nt, Artificial Sequence
  synthesized
ccucccugggccucaguuug

SEQ ID NO: 1167 - RNA, 20 nt, Artificial Sequence
  synthesized
ccugggccucaguuugcuca

SEQ ID NO: 1168 - RNA, 20 nt, Artificial Sequence
  synthesized
cucccugggccucaguuugc

SEQ ID NO: 1169 - RNA, 20 nt, Artificial Sequence
  synthesized
cucucugggccucaguuugc

SEQ ID NO: 1170 - RNA, 20 nt, Artificial Sequence
  synthesized
cugcuuccuuccccucccug

SEQ ID NO: 1171 - RNA, 20 nt, Artificial Sequence
  synthesized
cugcuuccuuccccucucug

SEQ ID NO: 1172 - RNA, 20 nt, Artificial Sequence
  synthesized
cuuccccucccugggccuca

SEQ ID NO: 1173 - RNA, 20 nt, Artificial Sequence
  synthesized
cuuccuuccccucccugggc

SEQ ID NO: 1174 - RNA, 20 nt, Artificial Sequence
  synthesized
gagaggggaaggaagcagga

SEQ ID NO: 1175 - RNA, 20 nt, Artificial Sequence
  synthesized
gaggcccagggaggggaagg

SEQ ID NO: 1176 - RNA, 20 nt, Artificial Sequence
  synthesized
gcccagagaggggaaggaag

SEQ ID NO: 1177 - RNA, 20 nt, Artificial Sequence
  synthesized
gcccagggaggggaaggaag

SEQ ID NO: 1178 - RNA, 20 nt, Artificial Sequence
  synthesized
gcuuccuuccccucccuggg

SEQ ID NO: 1179 - RNA, 20 nt, Artificial Sequence
  synthesized
ggaggggaaggaagcaggac

SEQ ID NO: 1180 - RNA, 20 nt, Artificial Sequence
  synthesized
ggcccagagaggggaaggaa

SEQ ID NO: 1181 - RNA, 20 nt, Artificial Sequence
  synthesized
ggcccagggaggggaaggaa

SEQ ID NO: 1182 - RNA, 20 nt, Artificial Sequence
  synthesized
gggaggggaaggaagcagga

SEQ ID NO: 1183 - RNA, 20 nt, Artificial Sequence
  synthesized
uccccucccugggccucagu

SEQ ID NO: 1184 - RNA, 20 nt, Artificial Sequence
  synthesized
ucccugggccucaguuugcu

SEQ ID NO: 1185 - RNA, 20 nt, Artificial Sequence
  synthesized
uccuuccccucccugggccu

SEQ ID NO: 1186 - RNA, 20 nt, Artificial Sequence
  synthesized
ucucugggccucaguuugcu

SEQ ID NO: 1187 - RNA, 20 nt, Artificial Sequence
  synthesized
ucugggccucaguuugcuca

SEQ ID NO: 1188 - RNA, 20 nt, Artificial Sequence
  synthesized
ugagcaaacugaggcccagg

SEQ ID NO: 1189 - RNA, 20 nt, Artificial Sequence
  synthesized
ugaggcccagggaggggaag

SEQ ID NO: 1190 - RNA, 20 nt, Artificial Sequence
  synthesized
ugcuuccuuccccucccugg

SEQ ID NO: 1191 - RNA, 20 nt, Artificial Sequence
  synthesized
uuccccucccugggccucag

SEQ ID NO: 1192 - RNA, 20 nt, Artificial Sequence
  synthesized
accuucugacuuugacauug

SEQ ID NO: 1193 - RNA, 20 nt, Artificial Sequence
  synthesized
acuugggaccuucugacuuu

SEQ ID NO: 1194 - RNA, 20 nt, Artificial Sequence
  synthesized
acuuggguccuucugacuuu

SEQ ID NO: 1195 - RNA, 20 nt, Artificial Sequence
  synthesized
aggacccaagucgggaaugg

SEQ ID NO: 1196 - RNA, 20 nt, Artificial Sequence
  synthesized
aggucccaagucgggaaugg

SEQ ID NO: 1197 - RNA, 20 nt, Artificial Sequence
  synthesized
aucccauucccgacuuggga

SEQ ID NO: 1198 - RNA, 20 nt, Artificial Sequence
  synthesized
aucccauucccgacuugggu

SEQ ID NO: 1199 - RNA, 20 nt, Artificial Sequence
  synthesized
augucaaagucagaaggacc

SEQ ID NO: 1200 - RNA, 20 nt, Artificial Sequence
  synthesized
augucaaagucagaaggucc

SEQ ID NO: 1201 - RNA, 20 nt, Artificial Sequence
  synthesized
caaagucagaaggacccaag

SEQ ID NO: 1202 - RNA, 20 nt, Artificial Sequence
  synthesized
caaagucagaaggucccaag

SEQ ID NO: 1203 - RNA, 20 nt, Artificial Sequence
  synthesized
caaugucaaagucagaagga

SEQ ID NO: 1204 - RNA, 20 nt, Artificial Sequence
  synthesized
caaugucaaagucagaaggu

SEQ ID NO: 1205 - RNA, 20 nt, Artificial Sequence
  synthesized
cagaaggacccaagucggga

SEQ ID NO: 1206 - RNA, 20 nt, Artificial Sequence
  synthesized
cagaaggucccaagucggga

SEQ ID NO: 1207 - RNA, 20 nt, Artificial Sequence
  synthesized
cauucccgacuugggaccuu

SEQ ID NO: 1208 - RNA, 20 nt, Artificial Sequence
  synthesized
cauucccgacuuggguccuu

SEQ ID NO: 1209 - RNA, 20 nt, Artificial Sequence
  synthesized
ccauucccgacuugggaccu

SEQ ID NO: 1210 - RNA, 20 nt, Artificial Sequence
  synthesized
ccauucccgacuuggguccu

SEQ ID NO: 1211 - RNA, 20 nt, Artificial Sequence
  synthesized
cccauucccgacuugggacc

SEQ ID NO: 1212 - RNA, 20 nt, Artificial Sequence
  synthesized
cccauucccgacuugggucc

SEQ ID NO: 1213 - RNA, 20 nt, Artificial Sequence
  synthesized
cccgacuugggaccuucuga

SEQ ID NO: 1214 - RNA, 20 nt, Artificial Sequence
  synthesized
cccgacuuggguccuucuga

SEQ ID NO: 1215 - RNA, 20 nt, Artificial Sequence
  synthesized
cgacuugggaccuucugacu

SEQ ID NO: 1216 - RNA, 20 nt, Artificial Sequence
  synthesized
cgacuuggguccuucugacu

SEQ ID NO: 1217 - RNA, 20 nt, Artificial Sequence
  synthesized
cuugggaccuucugacuuug

SEQ ID NO: 1218 - RNA, 20 nt, Artificial Sequence
  synthesized
cuuggguccuucugacuuug

SEQ ID NO: 1219 - RNA, 20 nt, Artificial Sequence
  synthesized
gggaccuucugacuuugaca

SEQ ID NO: 1220 - RNA, 20 nt, Artificial Sequence
  synthesized
ggguccuucugacuuugaca

SEQ ID NO: 1221 - RNA, 20 nt, Artificial Sequence
  synthesized
gucaaagucagaaggaccca

SEQ ID NO: 1222 - RNA, 20 nt, Artificial Sequence
  synthesized
gucaaagucagaagguccca

SEQ ID NO: 1223 - RNA, 20 nt, Artificial Sequence
  synthesized
gucagaaggacccaagucgg

SEQ ID NO: 1224 - RNA, 20 nt, Artificial Sequence
  synthesized
gucagaaggucccaagucgg

SEQ ID NO: 1225 - RNA, 20 nt, Artificial Sequence
  synthesized
ucaaagucagaaggacccaa

SEQ ID NO: 1226 - RNA, 20 nt, Artificial Sequence
  synthesized
ucaaagucagaaggucccaa

SEQ ID NO: 1227 - RNA, 20 nt, Artificial Sequence
  synthesized
ucagaaggacccaagucggg

SEQ ID NO: 1228 - RNA, 20 nt, Artificial Sequence
  synthesized
ucagaaggucccaagucggg

SEQ ID NO: 1229 - RNA, 20 nt, Artificial Sequence
  synthesized
ucccauucccgacuugggac

SEQ ID NO: 1230 - RNA, 20 nt, Artificial Sequence
  synthesized
ucccauucccgacuuggguc

SEQ ID NO: 1231 - RNA, 20 nt, Artificial Sequence
  synthesized
ucccgacuugggaccuucug

SEQ ID NO: 1232 - RNA, 20 nt, Artificial Sequence
  synthesized
ucccgacuuggguccuucug

SEQ ID NO: 1233 - RNA, 20 nt, Artificial Sequence
  synthesized
uccuucugacuuugacauug

SEQ ID NO: 1234 - RNA, 20 nt, Artificial Sequence
  synthesized
ugggaccuucugacuuugac

SEQ ID NO: 1235 - RNA, 20 nt, Artificial Sequence
  synthesized
uggguccuucugacuuugac

SEQ ID NO: 1236 - RNA, 20 nt, Artificial Sequence
  synthesized
ugucaaagucagaaggaccc

SEQ ID NO: 1237 - RNA, 20 nt, Artificial Sequence
  synthesized
ugucaaagucagaagguccc

SEQ ID NO: 1238 - RNA, 20 nt, Artificial Sequence
  synthesized
uucccgacuugggaccuucu

SEQ ID NO: 1239 - RNA, 20 nt, Artificial Sequence
  synthesized
uucccgacuuggguccuucu

SEQ ID NO: 1240 - RNA, 20 nt, Artificial Sequence
  synthesized
uugggaccuucugacuuuga

SEQ ID NO: 1241 - RNA, 20 nt, Artificial Sequence
  synthesized
uuggguccuucugacuuuga

SEQ ID NO: 1242 - RNA, 20 nt, Artificial Sequence
  synthesized
acugcacuccaaccugaguc

SEQ ID NO: 1243 - RNA, 20 nt, Artificial Sequence
  synthesized
agugcaguggcaugaucaug

SEQ ID NO: 1244 - RNA, 20 nt, Artificial Sequence
  synthesized
aucaugccacugcacuccaa

SEQ ID NO: 1245 - RNA, 20 nt, Artificial Sequence
  synthesized
caguggcaugaucauggcuc

SEQ ID NO: 1246 - RNA, 20 nt, Artificial Sequence
  synthesized
caugaucaugccacugcacu

SEQ ID NO: 1247 - RNA, 20 nt, Artificial Sequence
  synthesized
ccacugcacuccaaccugag

SEQ ID NO: 1248 - RNA, 20 nt, Artificial Sequence
  synthesized
ccgcugcacuccaaccugag

SEQ ID NO: 1249 - RNA, 20 nt, Artificial Sequence
  synthesized
cgcugcacuccaaccugagu

SEQ ID NO: 1250 - RNA, 20 nt, Artificial Sequence
  synthesized
gacucagguuggagugcagu

SEQ ID NO: 1251 - RNA, 20 nt, Artificial Sequence
  synthesized
gagccaugaucaugccacug

SEQ ID NO: 1252 - RNA, 20 nt, Artificial Sequence
  synthesized
gccaugaucaugccacugca

SEQ ID NO: 1253 - RNA, 20 nt, Artificial Sequence
  synthesized
gccgcugcacuccaaccuga

SEQ ID NO: 1254 - RNA, 20 nt, Artificial Sequence
  synthesized
gcugcacuccaaccugaguc

SEQ ID NO: 1255 - RNA, 20 nt, Artificial Sequence
  synthesized
gguuggagugcaguggcaug

SEQ ID NO: 1256 - RNA, 20 nt, Artificial Sequence
  synthesized
gugagccaugaucaugccac

SEQ ID NO: 1257 - RNA, 20 nt, Artificial Sequence
  synthesized
ucagguuggagugcaguggc

SEQ ID NO: 1258 - RNA, 20 nt, Artificial Sequence
  synthesized
ugaucaugccacugcacucc

SEQ ID NO: 1259 - RNA, 20 nt, Artificial Sequence
  synthesized
ugcaguggcaugaucauggc

SEQ ID NO: 1260 - RNA, 20 nt, Artificial Sequence
  synthesized
uuggagugcaguggcaugau

SEQ ID NO: 1261 - RNA, 20 nt, Artificial Sequence
  synthesized
acccgcggcugcucccaccc

SEQ ID NO: 1262 - RNA, 20 nt, Artificial Sequence
  synthesized
acccguggcugcucccaccc

SEQ ID NO: 1263 - RNA, 20 nt, Artificial Sequence
  synthesized
acgggucagccacaagggcc

SEQ ID NO: 1264 - RNA, 20 nt, Artificial Sequence
  synthesized
ccacgggucagccacaaggg

SEQ ID NO: 1265 - RNA, 20 nt, Artificial Sequence
  synthesized
cccuuguggcugacccgcgg

SEQ ID NO: 1266 - RNA, 20 nt, Artificial Sequence
  synthesized
cccuuguggcugacccgugg

SEQ ID NO: 1267 - RNA, 20 nt, Artificial Sequence
  synthesized
ccgcggcugcucccacccaa

SEQ ID NO: 1268 - RNA, 20 nt, Artificial Sequence
  synthesized
ccgcgggucagccacaaggg

SEQ ID NO: 1269 - RNA, 20 nt, Artificial Sequence
  synthesized
ccguggcugcucccacccaa

SEQ ID NO: 1270 - RNA, 20 nt, Artificial Sequence
  synthesized
ccuuguggcugacccgcggc

SEQ ID NO: 1271 - RNA, 20 nt, Artificial Sequence
  synthesized
ccuuguggcugacccguggc

SEQ ID NO: 1272 - RNA, 20 nt, Artificial Sequence
  synthesized
cgcggcugcucccacccaag

SEQ ID NO: 1273 - RNA, 20 nt, Artificial Sequence
  synthesized
cggcugcucccacccaagaa

SEQ ID NO: 1274 - RNA, 20 nt, Artificial Sequence
  synthesized
cguggcugcucccacccaag

SEQ ID NO: 1275 - RNA, 20 nt, Artificial Sequence
  synthesized
cugacccgcggcugcuccca

SEQ ID NO: 1276 - RNA, 20 nt, Artificial Sequence
  synthesized
cugacccguggcugcuccca

SEQ ID NO: 1277 - RNA, 20 nt, Artificial Sequence
  synthesized
cuugggugggagcagccacg

SEQ ID NO: 1278 - RNA, 20 nt, Artificial Sequence
  synthesized
cuugggugggagcagccgcg

SEQ ID NO: 1279 - RNA, 20 nt, Artificial Sequence
  synthesized
cuuguggcugacccgcggcu

SEQ ID NO: 1280 - RNA, 20 nt, Artificial Sequence
  synthesized
cuuguggcugacccguggcu

SEQ ID NO: 1281 - RNA, 20 nt, Artificial Sequence
  synthesized
gacccgcggcugcucccacc

SEQ ID NO: 1282 - RNA, 20 nt, Artificial Sequence
  synthesized
gacccguggcugcucccacc

SEQ ID NO: 1283 - RNA, 20 nt, Artificial Sequence
  synthesized
gagcagccacgggucagcca

SEQ ID NO: 1284 - RNA, 20 nt, Artificial Sequence
  synthesized
gagcagccgcgggucagcca

SEQ ID NO: 1285 - RNA, 20 nt, Artificial Sequence
  synthesized
gccacgggucagccacaagg

SEQ ID NO: 1286 - RNA, 20 nt, Artificial Sequence
  synthesized
gcccuuguggcugacccgcg

SEQ ID NO: 1287 - RNA, 20 nt, Artificial Sequence
  synthesized
gcccuuguggcugacccgug

SEQ ID NO: 1288 - RNA, 20 nt, Artificial Sequence
  synthesized
gccgcgggucagccacaagg

SEQ ID NO: 1289 - RNA, 20 nt, Artificial Sequence
  synthesized
gcggcugcucccacccaaga

SEQ ID NO: 1290 - RNA, 20 nt, Artificial Sequence
  synthesized
gcgggucagccacaagggcc

SEQ ID NO: 1291 - RNA, 20 nt, Artificial Sequence
  synthesized
gcugacccgcggcugcuccc

SEQ ID NO: 1292 - RNA, 20 nt, Artificial Sequence
  synthesized
gcugacccguggcugcuccc

SEQ ID NO: 1293 - RNA, 20 nt, Artificial Sequence
  synthesized
ggagcagccacgggucagcc

SEQ ID NO: 1294 - RNA, 20 nt, Artificial Sequence
  synthesized
ggagcagccgcgggucagcc

SEQ ID NO: 1295 - RNA, 20 nt, Artificial Sequence
  synthesized
ggcccuuguggcugacccgc

SEQ ID NO: 1296 - RNA, 20 nt, Artificial Sequence
  synthesized
ggcccuuguggcugacccgu

SEQ ID NO: 1297 - RNA, 20 nt, Artificial Sequence
  synthesized
ggcugacccgcggcugcucc

SEQ ID NO: 1298 - RNA, 20 nt, Artificial Sequence
  synthesized
ggcugacccguggcugcucc

SEQ ID NO: 1299 - RNA, 20 nt, Artificial Sequence
  synthesized
gggagcagccacgggucagc

SEQ ID NO: 1300 - RNA, 20 nt, Artificial Sequence
  synthesized
gggagcagccgcgggucagc

SEQ ID NO: 1301 - RNA, 20 nt, Artificial Sequence
  synthesized
gggugggagcagccacgggu

SEQ ID NO: 1302 - RNA, 20 nt, Artificial Sequence
  synthesized
gggugggagcagccgcgggu

SEQ ID NO: 1303 - RNA, 20 nt, Artificial Sequence
  synthesized
guggcugacccgcggcugcu

SEQ ID NO: 1304 - RNA, 20 nt, Artificial Sequence
  synthesized
guggcugacccguggcugcu

SEQ ID NO: 1305 - RNA, 20 nt, Artificial Sequence
  synthesized
guggcugcucccacccaaga

SEQ ID NO: 1306 - RNA, 20 nt, Artificial Sequence
  synthesized
gugggagcagccacggguca

SEQ ID NO: 1307 - RNA, 20 nt, Artificial Sequence
  synthesized
gugggagcagccgcggguca

SEQ ID NO: 1308 - RNA, 20 nt, Artificial Sequence
  synthesized
ugacccgcggcugcucccac

SEQ ID NO: 1309 - RNA, 20 nt, Artificial Sequence
  synthesized
ugacccguggcugcucccac

SEQ ID NO: 1310 - RNA, 20 nt, Artificial Sequence
  synthesized
uggcugacccgcggcugcuc

SEQ ID NO: 1311 - RNA, 20 nt, Artificial Sequence
  synthesized
uggcugacccguggcugcuc

SEQ ID NO: 1312 - RNA, 20 nt, Artificial Sequence
  synthesized
uggcugcucccacccaagaa

SEQ ID NO: 1313 - RNA, 20 nt, Artificial Sequence
  synthesized
ugggagcagccacgggucag

SEQ ID NO: 1314 - RNA, 20 nt, Artificial Sequence
  synthesized
ugggagcagccgcgggucag

SEQ ID NO: 1315 - RNA, 20 nt, Artificial Sequence
  synthesized
ugggugggagcagccacggg

SEQ ID NO: 1316 - RNA, 20 nt, Artificial Sequence
  synthesized
ugggugggagcagccgcggg

SEQ ID NO: 1317 - RNA, 20 nt, Artificial Sequence
  synthesized
uuguggcugacccgcggcug

SEQ ID NO: 1318 - RNA, 20 nt, Artificial Sequence
  synthesized
uuguggcugacccguggcug

SEQ ID NO: 1319 - RNA, 20 nt, Artificial Sequence
  synthesized
aaaugccauguaccaggugg

SEQ ID NO: 1320 - RNA, 20 nt, Artificial Sequence
  synthesized
aaucagccacgagggccuca

SEQ ID NO: 1321 - RNA, 20 nt, Artificial Sequence
  synthesized
aaucagccacgagggccucg

SEQ ID NO: 1322 - RNA, 20 nt, Artificial Sequence
  synthesized
acauggcauucgaggcccuc

SEQ ID NO: 1323 - RNA, 20 nt, Artificial Sequence
  synthesized
acauggcauuugaggcccuc

SEQ ID NO: 1324 - RNA, 20 nt, Artificial Sequence
  synthesized
accugguacauggcauucga

SEQ ID NO: 1325 - RNA, 20 nt, Artificial Sequence
  synthesized
accugguacauggcauuuga

SEQ ID NO: 1326 - RNA, 20 nt, Artificial Sequence
  synthesized
acgagggccucaaaugccau

SEQ ID NO: 1327 - RNA, 20 nt, Artificial Sequence
  synthesized
acgagggccucgaaugccau

SEQ ID NO: 1328 - RNA, 20 nt, Artificial Sequence
  synthesized
agccacgagggccucaaaug

SEQ ID NO: 1329 - RNA, 20 nt, Artificial Sequence
  synthesized
agccacgagggccucgaaug

SEQ ID NO: 1330 - RNA, 20 nt, Artificial Sequence
  synthesized
agggccucaaaugccaugua

SEQ ID NO: 1331 - RNA, 20 nt, Artificial Sequence
  synthesized
agggccucgaaugccaugua

SEQ ID NO: 1332 - RNA, 20 nt, Artificial Sequence
  synthesized
aucagccacgagggccucaa

SEQ ID NO: 1333 - RNA, 20 nt, Artificial Sequence
  synthesized
aucagccacgagggccucga

SEQ ID NO: 1334 - RNA, 20 nt, Artificial Sequence
  synthesized
auucgaggcccucguggcug

SEQ ID NO: 1335 - RNA, 20 nt, Artificial Sequence
  synthesized
auuugaggcccucguggcug

SEQ ID NO: 1336 - RNA, 20 nt, Artificial Sequence
  synthesized
caaaugccauguaccaggug

SEQ ID NO: 1337 - RNA, 20 nt, Artificial Sequence
  synthesized
cacgagggccucaaaugcca

SEQ ID NO: 1338 - RNA, 20 nt, Artificial Sequence
  synthesized
cacgagggccucgaaugcca

SEQ ID NO: 1339 - RNA, 20 nt, Artificial Sequence
  synthesized
cagccacgagggccucaaau

SEQ ID NO: 1340 - RNA, 20 nt, Artificial Sequence
  synthesized
cagccacgagggccucgaau

SEQ ID NO: 1341 - RNA, 20 nt, Artificial Sequence
  synthesized
cauucgaggcccucguggcu

SEQ ID NO: 1342 - RNA, 20 nt, Artificial Sequence
  synthesized
cauuugaggcccucguggcu

SEQ ID NO: 1343 - RNA, 20 nt, Artificial Sequence
  synthesized
ccaccugguacauggcauuc

SEQ ID NO: 1344 - RNA, 20 nt, Artificial Sequence
  synthesized
ccaccugguacauggcauuu

SEQ ID NO: 1345 - RNA, 20 nt, Artificial Sequence
  synthesized
ccacgagggccucaaaugcc

SEQ ID NO: 1346 - RNA, 20 nt, Artificial Sequence
  synthesized
ccacgagggccucgaaugcc

SEQ ID NO: 1347 - RNA, 20 nt, Artificial Sequence
  synthesized
ccucaaaugccauguaccag

SEQ ID NO: 1348 - RNA, 20 nt, Artificial Sequence
  synthesized
ccucgaaugccauguaccag

SEQ ID NO: 1349 - RNA, 20 nt, Artificial Sequence
  synthesized
ccugguacauggcauucgag

SEQ ID NO: 1350 - RNA, 20 nt, Artificial Sequence
  synthesized
ccugguacauggcauuugag

SEQ ID NO: 1351 - RNA, 20 nt, Artificial Sequence
  synthesized
cgaaugccauguaccaggug

SEQ ID NO: 1352 - RNA, 20 nt, Artificial Sequence
  synthesized
cgagggccucaaaugccaug

SEQ ID NO: 1353 - RNA, 20 nt, Artificial Sequence
  synthesized
cgagggccucgaaugccaug

SEQ ID NO: 1354 - RNA, 20 nt, Artificial Sequence
  synthesized
cugguacauggcauucgagg

SEQ ID NO: 1355 - RNA, 20 nt, Artificial Sequence
  synthesized
cugguacauggcauuugagg

SEQ ID NO: 1356 - RNA, 20 nt, Artificial Sequence
  synthesized
gaaugccauguaccaggugg

SEQ ID NO: 1357 - RNA, 20 nt, Artificial Sequence
  synthesized
gagggccucaaaugccaugu

SEQ ID NO: 1358 - RNA, 20 nt, Artificial Sequence
  synthesized
gagggccucgaaugccaugu

SEQ ID NO: 1359 - RNA, 20 nt, Artificial Sequence
  synthesized
gccacgagggccucaaaugc

SEQ ID NO: 1360 - RNA, 20 nt, Artificial Sequence
  synthesized
gccacgagggccucgaaugc

SEQ ID NO: 1361 - RNA, 20 nt, Artificial Sequence
  synthesized
ggcauucgaggcccucgugg

SEQ ID NO: 1362 - RNA, 20 nt, Artificial Sequence
  synthesized
ggcauuugaggcccucgugg

SEQ ID NO: 1363 - RNA, 20 nt, Artificial Sequence
  synthesized
gggccucaaaugccauguac

SEQ ID NO: 1364 - RNA, 20 nt, Artificial Sequence
  synthesized
gggccucgaaugccauguac

SEQ ID NO: 1365 - RNA, 20 nt, Artificial Sequence
  synthesized
gguacauggcauucgaggcc

SEQ ID NO: 1366 - RNA, 20 nt, Artificial Sequence
  synthesized
gguacauggcauuugaggcc

SEQ ID NO: 1367 - RNA, 20 nt, Artificial Sequence
  synthesized
guacauggcauucgaggccc

SEQ ID NO: 1368 - RNA, 20 nt, Artificial Sequence
  synthesized
guacauggcauuugaggccc

SEQ ID NO: 1369 - RNA, 20 nt, Artificial Sequence
  synthesized
ucaaaugccauguaccaggu

SEQ ID NO: 1370 - RNA, 20 nt, Artificial Sequence
  synthesized
ucagccacgagggccucaaa

SEQ ID NO: 1371 - RNA, 20 nt, Artificial Sequence
  synthesized
ucagccacgagggccucgaa

SEQ ID NO: 1372 - RNA, 20 nt, Artificial Sequence
  synthesized
ucgaaugccauguaccaggu

SEQ ID NO: 1373 - RNA, 20 nt, Artificial Sequence
  synthesized
ucgaggcccucguggcugau

SEQ ID NO: 1374 - RNA, 20 nt, Artificial Sequence
  synthesized
uggcauucgaggcccucgug

SEQ ID NO: 1375 - RNA, 20 nt, Artificial Sequence
  synthesized
uggcauuugaggcccucgug

SEQ ID NO: 1376 - RNA, 20 nt, Artificial Sequence
  synthesized
ugguacauggcauucgaggc

SEQ ID NO: 1377 - RNA, 20 nt, Artificial Sequence
  synthesized
ugguacauggcauuugaggc

SEQ ID NO: 1378 - RNA, 20 nt, Artificial Sequence
  synthesized
uugaggcccucguggcugau

SEQ ID NO: 1379 - RNA, 20 nt, Artificial Sequence
  synthesized
aagagagacagugagagaga

SEQ ID NO: 1380 - RNA, 20 nt, Artificial Sequence
  synthesized
aagagagacggugagagaga

SEQ ID NO: 1381 - RNA, 20 nt, Artificial Sequence
  synthesized
aaucucucucucaccgucuc

SEQ ID NO: 1382 - RNA, 20 nt, Artificial Sequence
  synthesized
aaucucucucucacugucuc

SEQ ID NO: 1383 - RNA, 20 nt, Artificial Sequence
  synthesized
agagacagugagagagagau

SEQ ID NO: 1384 - RNA, 20 nt, Artificial Sequence
  synthesized
agagacggugagagagagau

SEQ ID NO: 1385 - RNA, 20 nt, Artificial Sequence
  synthesized
agagagacagugagagagag

SEQ ID NO: 1386 - RNA, 20 nt, Artificial Sequence
  synthesized
agagagacggugagagagag

SEQ ID NO: 1387 - RNA, 20 nt, Artificial Sequence
  synthesized
agugagagagagauuaaggg

SEQ ID NO: 1388 - RNA, 20 nt, Artificial Sequence
  synthesized
aucucucucucaccgucucu

SEQ ID NO: 1389 - RNA, 20 nt, Artificial Sequence
  synthesized
aucucucucucacugucucu

SEQ ID NO: 1390 - RNA, 20 nt, Artificial Sequence
  synthesized
cagugagagagagauuaagg

SEQ ID NO: 1391 - RNA, 20 nt, Artificial Sequence
  synthesized
cccuuaaucucucucucacc

SEQ ID NO: 1392 - RNA, 20 nt, Artificial Sequence
  synthesized
cccuuaaucucucucucacu

SEQ ID NO: 1393 - RNA, 20 nt, Artificial Sequence
  synthesized
ccgucucucuucccacccag

SEQ ID NO: 1394 - RNA, 20 nt, Artificial Sequence
  synthesized
ccugggugggaagagagaca

SEQ ID NO: 1395 - RNA, 20 nt, Artificial Sequence
  synthesized
ccugggugggaagagagacg

SEQ ID NO: 1396 - RNA, 20 nt, Artificial Sequence
  synthesized
ccuuaaucucucucucaccg

SEQ ID NO: 1397 - RNA, 20 nt, Artificial Sequence
  synthesized
ccuuaaucucucucucacug

SEQ ID NO: 1398 - RNA, 20 nt, Artificial Sequence
  synthesized
cggugagagagagauuaagg

SEQ ID NO: 1399 - RNA, 20 nt, Artificial Sequence
  synthesized
cgucucucuucccacccagg

SEQ ID NO: 1400 - RNA, 20 nt, Artificial Sequence
  synthesized
cucucaccgucucucuuccc

SEQ ID NO: 1401 - RNA, 20 nt, Artificial Sequence
  synthesized
cucucacugucucucuuccc

SEQ ID NO: 1402 - RNA, 20 nt, Artificial Sequence
  synthesized
cucucucaccgucucucuuc

SEQ ID NO: 1403 - RNA, 20 nt, Artificial Sequence
  synthesized
cucucucacugucucucuuc

SEQ ID NO: 1404 - RNA, 20 nt, Artificial Sequence
  synthesized
cugucucucuucccacccag

SEQ ID NO: 1405 - RNA, 20 nt, Artificial Sequence
  synthesized
cuuaaucucucucucaccgu

SEQ ID NO: 1406 - RNA, 20 nt, Artificial Sequence
  synthesized
cuuaaucucucucucacugu

SEQ ID NO: 1407 - RNA, 20 nt, Artificial Sequence
  synthesized
gagacagugagagagagauu

SEQ ID NO: 1408 - RNA, 20 nt, Artificial Sequence
  synthesized
gagacggugagagagagauu

SEQ ID NO: 1409 - RNA, 20 nt, Artificial Sequence
  synthesized
gagagacagugagagagaga

SEQ ID NO: 1410 - RNA, 20 nt, Artificial Sequence
  synthesized
gagagacggugagagagaga

SEQ ID NO: 1411 - RNA, 20 nt, Artificial Sequence
  synthesized
ggaagagagacagugagaga

SEQ ID NO: 1412 - RNA, 20 nt, Artificial Sequence
  synthesized
ggaagagagacggugagaga

SEQ ID NO: 1413 - RNA, 20 nt, Artificial Sequence
  synthesized
ggugagagagagauuaaggg

SEQ ID NO: 1414 - RNA, 20 nt, Artificial Sequence
  synthesized
ggugggaagagagacaguga

SEQ ID NO: 1415 - RNA, 20 nt, Artificial Sequence
  synthesized
ggugggaagagagacgguga

SEQ ID NO: 1416 - RNA, 20 nt, Artificial Sequence
  synthesized
uaaucucucucucaccgucu

SEQ ID NO: 1417 - RNA, 20 nt, Artificial Sequence
  synthesized
uaaucucucucucacugucu

SEQ ID NO: 1418 - RNA, 20 nt, Artificial Sequence
  synthesized
ucaccgucucucuucccacc

SEQ ID NO: 1419 - RNA, 20 nt, Artificial Sequence
  synthesized
ucacugucucucuucccacc

SEQ ID NO: 1420 - RNA, 20 nt, Artificial Sequence
  synthesized
ucucaccgucucucuuccca

SEQ ID NO: 1421 - RNA, 20 nt, Artificial Sequence
  synthesized
ucucacugucucucuuccca

SEQ ID NO: 1422 - RNA, 20 nt, Artificial Sequence
  synthesized
ucucucaccgucucucuucc

SEQ ID NO: 1423 - RNA, 20 nt, Artificial Sequence
  synthesized
ucucucacugucucucuucc

SEQ ID NO: 1424 - RNA, 20 nt, Artificial Sequence
  synthesized
ucucucucaccgucucucuu

SEQ ID NO: 1425 - RNA, 20 nt, Artificial Sequence
  synthesized
ucucucucacugucucucuu

SEQ ID NO: 1426 - RNA, 20 nt, Artificial Sequence
  synthesized
ucucucucucaccgucucuc

SEQ ID NO: 1427 - RNA, 20 nt, Artificial Sequence
  synthesized
ucucucucucacugucucuc

SEQ ID NO: 1428 - RNA, 20 nt, Artificial Sequence
  synthesized
ugggugggaagagagacagu

SEQ ID NO: 1429 - RNA, 20 nt, Artificial Sequence
  synthesized
ugggugggaagagagacggu

SEQ ID NO: 1430 - RNA, 20 nt, Artificial Sequence
  synthesized
ugucucucuucccacccagg

SEQ ID NO: 1431 - RNA, 20 nt, Artificial Sequence
  synthesized
uuaaucucucucucaccguc

SEQ ID NO: 1432 - RNA, 20 nt, Artificial Sequence
  synthesized
uuaaucucucucucacuguc

SEQ ID NO: 1433 - RNA, 20 nt, Artificial Sequence
  synthesized
acaaccucacagacacccug

SEQ ID NO: 1434 - RNA, 20 nt, Artificial Sequence
  synthesized
acaaccucacagccacccug

SEQ ID NO: 1435 - RNA, 20 nt, Artificial Sequence
  synthesized
acacccuggacggaaucugc

SEQ ID NO: 1436 - RNA, 20 nt, Artificial Sequence
  synthesized
acagacacccuggacggaau

SEQ ID NO: 1437 - RNA, 20 nt, Artificial Sequence
  synthesized
acagccacccuggacggaau

SEQ ID NO: 1438 - RNA, 20 nt, Artificial Sequence
  synthesized
agacacccuggacggaaucu

SEQ ID NO: 1439 - RNA, 20 nt, Artificial Sequence
  synthesized
agauuccguccaggguggcu

SEQ ID NO: 1440 - RNA, 20 nt, Artificial Sequence
  synthesized
agauuccguccagggugucu

SEQ ID NO: 1441 - RNA, 20 nt, Artificial Sequence
  synthesized
agccacccuggacggaaucu

SEQ ID NO: 1442 - RNA, 20 nt, Artificial Sequence
  synthesized
aggguggcugugagguugug

SEQ ID NO: 1443 - RNA, 20 nt, Artificial Sequence
  synthesized
agggugucugugagguugug

SEQ ID NO: 1444 - RNA, 20 nt, Artificial Sequence
  synthesized
auuccguccaggguggcugu

SEQ ID NO: 1445 - RNA, 20 nt, Artificial Sequence
  synthesized
auuccguccagggugucugu

SEQ ID NO: 1446 - RNA, 20 nt, Artificial Sequence
  synthesized
caaccucacagacacccugg

SEQ ID NO: 1447 - RNA, 20 nt, Artificial Sequence
  synthesized
caaccucacagccacccugg

SEQ ID NO: 1448 - RNA, 20 nt, Artificial Sequence
  synthesized
cacagacacccuggacggaa

SEQ ID NO: 1449 - RNA, 20 nt, Artificial Sequence
  synthesized
cacagccacccuggacggaa

SEQ ID NO: 1450 - RNA, 20 nt, Artificial Sequence
  synthesized
cagacacccuggacggaauc

SEQ ID NO: 1451 - RNA, 20 nt, Artificial Sequence
  synthesized
cagccacccuggacggaauc

SEQ ID NO: 1452 - RNA, 20 nt, Artificial Sequence
  synthesized
ccacccuggacggaaucugc

SEQ ID NO: 1453 - RNA, 20 nt, Artificial Sequence
  synthesized
ccguccaggguggcugugag

SEQ ID NO: 1454 - RNA, 20 nt, Artificial Sequence
  synthesized
ccguccagggugucugugag

SEQ ID NO: 1455 - RNA, 20 nt, Artificial Sequence
  synthesized
ccucacagacacccuggacg

SEQ ID NO: 1456 - RNA, 20 nt, Artificial Sequence
  synthesized
ccucacagccacccuggacg

SEQ ID NO: 1457 - RNA, 20 nt, Artificial Sequence
  synthesized
cguccaggguggcugugagg

SEQ ID NO: 1458 - RNA, 20 nt, Artificial Sequence
  synthesized
cguccagggugucugugagg

SEQ ID NO: 1459 - RNA, 20 nt, Artificial Sequence
  synthesized
cucacagacacccuggacgg

SEQ ID NO: 1460 - RNA, 20 nt, Artificial Sequence
  synthesized
cucacagccacccuggacgg

SEQ ID NO: 1461 - RNA, 20 nt, Artificial Sequence
  synthesized
cuccacaaccucacagacac

SEQ ID NO: 1462 - RNA, 20 nt, Artificial Sequence
  synthesized
cuccacaaccucacagccac

SEQ ID NO: 1463 - RNA, 20 nt, Artificial Sequence
  synthesized
gacacccuggacggaaucug

SEQ ID NO: 1464 - RNA, 20 nt, Artificial Sequence
  synthesized
gcagauuccguccagggugg

SEQ ID NO: 1465 - RNA, 20 nt, Artificial Sequence
  synthesized
gcagauuccguccagggugu

SEQ ID NO: 1466 - RNA, 20 nt, Artificial Sequence
  synthesized
gccacccuggacggaaucug

SEQ ID NO: 1467 - RNA, 20 nt, Artificial Sequence
  synthesized
gguggcugugagguugugga

SEQ ID NO: 1468 - RNA, 20 nt, Artificial Sequence
  synthesized
ggugucugugagguugugga

SEQ ID NO: 1469 - RNA, 20 nt, Artificial Sequence
  synthesized
gucuccacaaccucacagac

SEQ ID NO: 1470 - RNA, 20 nt, Artificial Sequence
  synthesized
gucuccacaaccucacagcc

SEQ ID NO: 1471 - RNA, 20 nt, Artificial Sequence
  synthesized
guggcugugagguuguggag

SEQ ID NO: 1472 - RNA, 20 nt, Artificial Sequence
  synthesized
gugucugugagguuguggag

SEQ ID NO: 1473 - RNA, 20 nt, Artificial Sequence
  synthesized
ucacagacacccuggacgga

SEQ ID NO: 1474 - RNA, 20 nt, Artificial Sequence
  synthesized
ucacagccacccuggacgga

SEQ ID NO: 1475 - RNA, 20 nt, Artificial Sequence
  synthesized
uccacaaccucacagacacc

SEQ ID NO: 1476 - RNA, 20 nt, Artificial Sequence
  synthesized
uccacaaccucacagccacc

SEQ ID NO: 1477 - RNA, 20 nt, Artificial Sequence
  synthesized
uccaggguggcugugagguu

SEQ ID NO: 1478 - RNA, 20 nt, Artificial Sequence
  synthesized
uccagggugucugugagguu

SEQ ID NO: 1479 - RNA, 20 nt, Artificial Sequence
  synthesized
uccguccaggguggcuguga

SEQ ID NO: 1480 - RNA, 20 nt, Artificial Sequence
  synthesized
uccguccagggugucuguga

SEQ ID NO: 1481 - RNA, 20 nt, Artificial Sequence
  synthesized
ucuccacaaccucacagaca

SEQ ID NO: 1482 - RNA, 20 nt, Artificial Sequence
  synthesized
ucuccacaaccucacagcca

SEQ ID NO: 1483 - RNA, 20 nt, Artificial Sequence
  synthesized
ugucuccacaaccucacaga

SEQ ID NO: 1484 - RNA, 20 nt, Artificial Sequence
  synthesized
ugucuccacaaccucacagc

SEQ ID NO: 1485 - RNA, 20 nt, Artificial Sequence
  synthesized
acccacccugccuuagcccu

SEQ ID NO: 1486 - RNA, 20 nt, Artificial Sequence
  synthesized
acccgcccugccuuagcccu

SEQ ID NO: 1487 - RNA, 20 nt, Artificial Sequence
  synthesized
agaggccccaucccacccac

SEQ ID NO: 1488 - RNA, 20 nt, Artificial Sequence
  synthesized
agaggccccaucccacccgc

SEQ ID NO: 1489 - RNA, 20 nt, Artificial Sequence
  synthesized
aggcagggcgggugggaugg

SEQ ID NO: 1490 - RNA, 20 nt, Artificial Sequence
  synthesized
aggcagggugggugggaugg

SEQ ID NO: 1491 - RNA, 20 nt, Artificial Sequence
  synthesized
aggccccaucccacccaccc

SEQ ID NO: 1492 - RNA, 20 nt, Artificial Sequence
  synthesized
aggccccaucccacccgccc

SEQ ID NO: 1493 - RNA, 20 nt, Artificial Sequence
  synthesized
aucccacccacccugccuua

SEQ ID NO: 1494 - RNA, 20 nt, Artificial Sequence
  synthesized
aucccacccgcccugccuua

SEQ ID NO: 1495 - RNA, 20 nt, Artificial Sequence
  synthesized
cacccacccugccuuagccc

SEQ ID NO: 1496 - RNA, 20 nt, Artificial Sequence
  synthesized
cacccgcccugccuuagccc

SEQ ID NO: 1497 - RNA, 20 nt, Artificial Sequence
  synthesized
cacccugccuuagcccugcc

SEQ ID NO: 1498 - RNA, 20 nt, Artificial Sequence
  synthesized
cagggcgggugggauggggc

SEQ ID NO: 1499 - RNA, 20 nt, Artificial Sequence
  synthesized
cagggugggugggauggggc

SEQ ID NO: 1500 - RNA, 20 nt, Artificial Sequence
  synthesized
caucccacccacccugccuu

SEQ ID NO: 1501 - RNA, 20 nt, Artificial Sequence
  synthesized
caucccacccgcccugccuu

SEQ ID NO: 1502 - RNA, 20 nt, Artificial Sequence
  synthesized
ccacccacccugccuuagcc

SEQ ID NO: 1503 - RNA, 20 nt, Artificial Sequence
  synthesized
ccacccgcccugccuuagcc

SEQ ID NO: 1504 - RNA, 20 nt, Artificial Sequence
  synthesized
ccacccugccuuagcccugc

SEQ ID NO: 1505 - RNA, 20 nt, Artificial Sequence
  synthesized
ccaucccacccacccugccu

SEQ ID NO: 1506 - RNA, 20 nt, Artificial Sequence
  synthesized
ccaucccacccgcccugccu

SEQ ID NO: 1507 - RNA, 20 nt, Artificial Sequence
  synthesized
cccacccacccugccuuagc

SEQ ID NO: 1508 - RNA, 20 nt, Artificial Sequence
  synthesized
cccacccgcccugccuuagc

SEQ ID NO: 1509 - RNA, 20 nt, Artificial Sequence
  synthesized
cccacccugccuuagcccug

SEQ ID NO: 1510 - RNA, 20 nt, Artificial Sequence
  synthesized
cccaucccacccacccugcc

SEQ ID NO: 1511 - RNA, 20 nt, Artificial Sequence
  synthesized
cccaucccacccgcccugcc

SEQ ID NO: 1512 - RNA, 20 nt, Artificial Sequence
  synthesized
cccgcccugccuuagcccug

SEQ ID NO: 1513 - RNA, 20 nt, Artificial Sequence
  synthesized
ccgcccugccuuagcccugc

SEQ ID NO: 1514 - RNA, 20 nt, Artificial Sequence
  synthesized
cgcccugccuuagcccugcc

SEQ ID NO: 1515 - RNA, 20 nt, Artificial Sequence
  synthesized
cgggugggauggggccucuc

SEQ ID NO: 1516 - RNA, 20 nt, Artificial Sequence
  synthesized
gagaggccccaucccaccca

SEQ ID NO: 1517 - RNA, 20 nt, Artificial Sequence
  synthesized
gagaggccccaucccacccg

SEQ ID NO: 1518 - RNA, 20 nt, Artificial Sequence
  synthesized
gaggccccaucccacccacc

SEQ ID NO: 1519 - RNA, 20 nt, Artificial Sequence
  synthesized
gaggccccaucccacccgcc

SEQ ID NO: 1520 - RNA, 20 nt, Artificial Sequence
  synthesized
gcagggcgggugggaugggg

SEQ ID NO: 1521 - RNA, 20 nt, Artificial Sequence
  synthesized
gcagggcuaaggcagggcgg

SEQ ID NO: 1522 - RNA, 20 nt, Artificial Sequence
  synthesized
gcagggcuaaggcagggugg

SEQ ID NO: 1523 - RNA, 20 nt, Artificial Sequence
  synthesized
gcagggugggugggaugggg

SEQ ID NO: 1524 - RNA, 20 nt, Artificial Sequence
  synthesized
gccccaucccacccacccug

SEQ ID NO: 1525 - RNA, 20 nt, Artificial Sequence
  synthesized
gccccaucccacccgcccug

SEQ ID NO: 1526 - RNA, 20 nt, Artificial Sequence
  synthesized
gcgggugggauggggccucu

SEQ ID NO: 1527 - RNA, 20 nt, Artificial Sequence
  synthesized
gcuaaggcagggcggguggg

SEQ ID NO: 1528 - RNA, 20 nt, Artificial Sequence
  synthesized
gcuaaggcaggguggguggg

SEQ ID NO: 1529 - RNA, 20 nt, Artificial Sequence
  synthesized
ggcagggcgggugggauggg

SEQ ID NO: 1530 - RNA, 20 nt, Artificial Sequence
  synthesized
ggcagggugggugggauggg

SEQ ID NO: 1531 - RNA, 20 nt, Artificial Sequence
  synthesized
ggccccaucccacccacccu

SEQ ID NO: 1532 - RNA, 20 nt, Artificial Sequence
  synthesized
ggccccaucccacccgcccu

SEQ ID NO: 1533 - RNA, 20 nt, Artificial Sequence
  synthesized
ggcgggugggauggggccuc

SEQ ID NO: 1534 - RNA, 20 nt, Artificial Sequence
  synthesized
ggcuaaggcagggcgggugg

SEQ ID NO: 1535 - RNA, 20 nt, Artificial Sequence
  synthesized
ggcuaaggcagggugggugg

SEQ ID NO: 1536 - RNA, 20 nt, Artificial Sequence
  synthesized
gggcgggugggauggggccu

SEQ ID NO: 1537 - RNA, 20 nt, Artificial Sequence
  synthesized
gggugggugggauggggccu

SEQ ID NO: 1538 - RNA, 20 nt, Artificial Sequence
  synthesized
ggugggugggauggggccuc

SEQ ID NO: 1539 - RNA, 20 nt, Artificial Sequence
  synthesized
gugggugggauggggccucu

SEQ ID NO: 1540 - RNA, 20 nt, Artificial Sequence
  synthesized
ucccacccacccugccuuag

SEQ ID NO: 1541 - RNA, 20 nt, Artificial Sequence
  synthesized
ucccacccgcccugccuuag

SEQ ID NO: 1542 - RNA, 20 nt, Artificial Sequence
  synthesized
ugggugggauggggccucuc

SEQ ID NO: 1543 - RNA, 20 nt, Artificial Sequence
  synthesized
aaggccagcgggaugugugc

SEQ ID NO: 1544 - RNA, 20 nt, Artificial Sequence
  synthesized
acaucccgcuggccucgggg

SEQ ID NO: 1545 - RNA, 20 nt, Artificial Sequence
  synthesized
acaucccgcuggccuugggg

SEQ ID NO: 1546 - RNA, 20 nt, Artificial Sequence
  synthesized
acguuccccaaggccagcgg

SEQ ID NO: 1547 - RNA, 20 nt, Artificial Sequence
  synthesized
acguuccccgaggccagcgg

SEQ ID NO: 1548 - RNA, 20 nt, Artificial Sequence
  synthesized
agucccacguuccccaaggc

SEQ ID NO: 1549 - RNA, 20 nt, Artificial Sequence
  synthesized
agucccacguuccccgaggc

SEQ ID NO: 1550 - RNA, 20 nt, Artificial Sequence
  synthesized
caaggccagcgggaugugug

SEQ ID NO: 1551 - RNA, 20 nt, Artificial Sequence
  synthesized
cacaucccgcuggccucggg

SEQ ID NO: 1552 - RNA, 20 nt, Artificial Sequence
  synthesized
cacaucccgcuggccuuggg

SEQ ID NO: 1553 - RNA, 20 nt, Artificial Sequence
  synthesized
caucccgcuggccucgggga

SEQ ID NO: 1554 - RNA, 20 nt, Artificial Sequence
  synthesized
caucccgcuggccuugggga

SEQ ID NO: 1555 - RNA, 20 nt, Artificial Sequence
  synthesized
ccaaggccagcgggaugugu

SEQ ID NO: 1556 - RNA, 20 nt, Artificial Sequence
  synthesized
cccaaggccagcgggaugug

SEQ ID NO: 1557 - RNA, 20 nt, Artificial Sequence
  synthesized
ccccaaggccagcgggaugu

SEQ ID NO: 1558 - RNA, 20 nt, Artificial Sequence
  synthesized
ccccgaggccagcgggaugu

SEQ ID NO: 1559 - RNA, 20 nt, Artificial Sequence
  synthesized
cccgaggccagcgggaugug

SEQ ID NO: 1560 - RNA, 20 nt, Artificial Sequence
  synthesized
ccgaggccagcgggaugugu

SEQ ID NO: 1561 - RNA, 20 nt, Artificial Sequence
  synthesized
ccucggggaacgugggacuc

SEQ ID NO: 1562 - RNA, 20 nt, Artificial Sequence
  synthesized
ccuuggggaacgugggacuc

SEQ ID NO: 1563 - RNA, 20 nt, Artificial Sequence
  synthesized
cgaggccagcgggaugugug

SEQ ID NO: 1564 - RNA, 20 nt, Artificial Sequence
  synthesized
cguuccccaaggccagcggg

SEQ ID NO: 1565 - RNA, 20 nt, Artificial Sequence
  synthesized
cguuccccgaggccagcggg

SEQ ID NO: 1566 - RNA, 20 nt, Artificial Sequence
  synthesized
cuggccucggggaacguggg

SEQ ID NO: 1567 - RNA, 20 nt, Artificial Sequence
  synthesized
cuggccuuggggaacguggg

SEQ ID NO: 1568 - RNA, 20 nt, Artificial Sequence
  synthesized
gaggccagcgggaugugugc

SEQ ID NO: 1569 - RNA, 20 nt, Artificial Sequence
  synthesized
gagucccacguuccccaagg

SEQ ID NO: 1570 - RNA, 20 nt, Artificial Sequence
  synthesized
gagucccacguuccccgagg

SEQ ID NO: 1571 - RNA, 20 nt, Artificial Sequence
  synthesized
gcuggccucggggaacgugg

SEQ ID NO: 1572 - RNA, 20 nt, Artificial Sequence
  synthesized
gcuggccuuggggaacgugg

SEQ ID NO: 1573 - RNA, 20 nt, Artificial Sequence
  synthesized
ggagucccacguuccccaag

SEQ ID NO: 1574 - RNA, 20 nt, Artificial Sequence
  synthesized
ggagucccacguuccccgag

SEQ ID NO: 1575 - RNA, 20 nt, Artificial Sequence
  synthesized
ggccucggggaacgugggac

SEQ ID NO: 1576 - RNA, 20 nt, Artificial Sequence
  synthesized
ggccuuggggaacgugggac

SEQ ID NO: 1577 - RNA, 20 nt, Artificial Sequence
  synthesized
ucccacguuccccaaggcca

SEQ ID NO: 1578 - RNA, 20 nt, Artificial Sequence
  synthesized
ucccacguuccccgaggcca

SEQ ID NO: 1579 - RNA, 20 nt, Artificial Sequence
  synthesized
ucccgcuggccucggggaac

SEQ ID NO: 1580 - RNA, 20 nt, Artificial Sequence
  synthesized
ucccgcuggccuuggggaac

SEQ ID NO: 1581 - RNA, 20 nt, Artificial Sequence
  synthesized
ucggggaacgugggacucca

SEQ ID NO: 1582 - RNA, 20 nt, Artificial Sequence
  synthesized
uggagucccacguuccccaa

SEQ ID NO: 1583 - RNA, 20 nt, Artificial Sequence
  synthesized
uggagucccacguuccccga

SEQ ID NO: 1584 - RNA, 20 nt, Artificial Sequence
  synthesized
uggccucggggaacguggga

SEQ ID NO: 1585 - RNA, 20 nt, Artificial Sequence
  synthesized
uggccuuggggaacguggga

SEQ ID NO: 1586 - RNA, 20 nt, Artificial Sequence
  synthesized
uuccccaaggccagcgggau

SEQ ID NO: 1587 - RNA, 20 nt, Artificial Sequence
  synthesized
uuccccgaggccagcgggau

SEQ ID NO: 1588 - RNA, 20 nt, Artificial Sequence
  synthesized
uuggggaacgugggacucca

SEQ ID NO: 1589 - RNA, 20 nt, Artificial Sequence
  synthesized
accccaggcccaaucucacc

SEQ ID NO: 1590 - RNA, 20 nt, Artificial Sequence
  synthesized
accccaggcccgaucucacc

SEQ ID NO: 1591 - RNA, 20 nt, Artificial Sequence
  synthesized
agaccccaggcccaaucuca

SEQ ID NO: 1592 - RNA, 20 nt, Artificial Sequence
  synthesized
agaccccaggcccgaucuca

SEQ ID NO: 1593 - RNA, 20 nt, Artificial Sequence
  synthesized
agaucgggccuggggucuca

SEQ ID NO: 1594 - RNA, 20 nt, Artificial Sequence
  synthesized
agauugggccuggggucuca

SEQ ID NO: 1595 - RNA, 20 nt, Artificial Sequence
  synthesized
agggugagaucgggccuggg

SEQ ID NO: 1596 - RNA, 20 nt, Artificial Sequence
  synthesized
agggugagauugggccuggg

SEQ ID NO: 1597 - RNA, 20 nt, Artificial Sequence
  synthesized
aucgggccuggggucucacc

SEQ ID NO: 1598 - RNA, 20 nt, Artificial Sequence
  synthesized
auugggccuggggucucacc

SEQ ID NO: 1599 - RNA, 20 nt, Artificial Sequence
  synthesized
caaugagggugagaucgggc

SEQ ID NO: 1600 - RNA, 20 nt, Artificial Sequence
  synthesized
caggcccgaucucacccuca

SEQ ID NO: 1601 - RNA, 20 nt, Artificial Sequence
  synthesized
ccaaugagggugagaucggg

SEQ ID NO: 1602 - RNA, 20 nt, Artificial Sequence
  synthesized
ccaggcccgaucucacccuc

SEQ ID NO: 1603 - RNA, 20 nt, Artificial Sequence
  synthesized
cccaaugagggugagaucgg

SEQ ID NO: 1604 - RNA, 20 nt, Artificial Sequence
  synthesized
cccaggcccgaucucacccu

SEQ ID NO: 1605 - RNA, 20 nt, Artificial Sequence
  synthesized
ccccaggcccgaucucaccc

SEQ ID NO: 1606 - RNA, 20 nt, Artificial Sequence
  synthesized
cccgaucucacccucauugg

SEQ ID NO: 1607 - RNA, 20 nt, Artificial Sequence
  synthesized
ccgaucucacccucauuggg

SEQ ID NO: 1608 - RNA, 20 nt, Artificial Sequence
  synthesized
cgaucucacccucauuggga

SEQ ID NO: 1609 - RNA, 20 nt, Artificial Sequence
  synthesized
cgggccuggggucucacccc

SEQ ID NO: 1610 - RNA, 20 nt, Artificial Sequence
  synthesized
gaccccaggcccaaucucac

SEQ ID NO: 1611 - RNA, 20 nt, Artificial Sequence
  synthesized
gaccccaggcccgaucucac

SEQ ID NO: 1612 - RNA, 20 nt, Artificial Sequence
  synthesized
gagaccccaggcccaaucuc

SEQ ID NO: 1613 - RNA, 20 nt, Artificial Sequence
  synthesized
gagaccccaggcccgaucuc

SEQ ID NO: 1614 - RNA, 20 nt, Artificial Sequence
  synthesized
gagaucgggccuggggucuc

SEQ ID NO: 1615 - RNA, 20 nt, Artificial Sequence
  synthesized
gagauugggccuggggucuc

SEQ ID NO: 1616 - RNA, 20 nt, Artificial Sequence
  synthesized
gagggugagaucgggccugg

SEQ ID NO: 1617 - RNA, 20 nt, Artificial Sequence
  synthesized
gagggugagauugggccugg

SEQ ID NO: 1618 - RNA, 20 nt, Artificial Sequence
  synthesized
gaucgggccuggggucucac

SEQ ID NO: 1619 - RNA, 20 nt, Artificial Sequence
  synthesized
gauugggccuggggucucac

SEQ ID NO: 1620 - RNA, 20 nt, Artificial Sequence
  synthesized
ggggugagaccccaggccca

SEQ ID NO: 1621 - RNA, 20 nt, Artificial Sequence
  synthesized
ggggugagaccccaggcccg

SEQ ID NO: 1622 - RNA, 20 nt, Artificial Sequence
  synthesized
ggugagaccccaggcccaau

SEQ ID NO: 1623 - RNA, 20 nt, Artificial Sequence
  synthesized
ggugagaccccaggcccgau

SEQ ID NO: 1624 - RNA, 20 nt, Artificial Sequence
  synthesized
ggugagaucgggccuggggu

SEQ ID NO: 1625 - RNA, 20 nt, Artificial Sequence
  synthesized
ggugagauugggccuggggu

SEQ ID NO: 1626 - RNA, 20 nt, Artificial Sequence
  synthesized
gugagaccccaggcccaauc

SEQ ID NO: 1627 - RNA, 20 nt, Artificial Sequence
  synthesized
gugagaccccaggcccgauc

SEQ ID NO: 1628 - RNA, 20 nt, Artificial Sequence
  synthesized
gugagaucgggccugggguc

SEQ ID NO: 1629 - RNA, 20 nt, Artificial Sequence
  synthesized
gugagauugggccugggguc

SEQ ID NO: 1630 - RNA, 20 nt, Artificial Sequence
  synthesized
ucccaaugagggugagaucg

SEQ ID NO: 1631 - RNA, 20 nt, Artificial Sequence
  synthesized
ucgggccuggggucucaccc

SEQ ID NO: 1632 - RNA, 20 nt, Artificial Sequence
  synthesized
ugagaccccaggcccaaucu

SEQ ID NO: 1633 - RNA, 20 nt, Artificial Sequence
  synthesized
ugagaccccaggcccgaucu

SEQ ID NO: 1634 - RNA, 20 nt, Artificial Sequence
  synthesized
ugagaucgggccuggggucu

SEQ ID NO: 1635 - RNA, 20 nt, Artificial Sequence
  synthesized
ugagauugggccuggggucu

SEQ ID NO: 1636 - RNA, 20 nt, Artificial Sequence
  synthesized
ugggccuggggucucacccc

SEQ ID NO: 1637 - RNA, 20 nt, Artificial Sequence
  synthesized
uugggccuggggucucaccc

SEQ ID NO: 1638 - RNA, 20 nt, Artificial Sequence
  synthesized
acaaggggccacaauauggc

SEQ ID NO: 1639 - RNA, 20 nt, Artificial Sequence
  synthesized
acccaguuacaaggggccac

SEQ ID NO: 1640 - RNA, 20 nt, Artificial Sequence
  synthesized
acccaguuccaaggggccac

SEQ ID NO: 1641 - RNA, 20 nt, Artificial Sequence
  synthesized
auuguggccccuuggaacug

SEQ ID NO: 1642 - RNA, 20 nt, Artificial Sequence
  synthesized
auuguggccccuuguaacug

SEQ ID NO: 1643 - RNA, 20 nt, Artificial Sequence
  synthesized
caguuacaaggggccacaau

SEQ ID NO: 1644 - RNA, 20 nt, Artificial Sequence
  synthesized
caguuccaaggggccacaau

SEQ ID NO: 1645 - RNA, 20 nt, Artificial Sequence
  synthesized
ccaaggggccacaauauggc

SEQ ID NO: 1646 - RNA, 20 nt, Artificial Sequence
  synthesized
ccauauuguggccccuugga

SEQ ID NO: 1647 - RNA, 20 nt, Artificial Sequence
  synthesized
ccauauuguggccccuugua

SEQ ID NO: 1648 - RNA, 20 nt, Artificial Sequence
  synthesized
cccaguuacaaggggccaca

SEQ ID NO: 1649 - RNA, 20 nt, Artificial Sequence
  synthesized
cccaguuccaaggggccaca

SEQ ID NO: 1650 - RNA, 20 nt, Artificial Sequence
  synthesized
cccuuguaacugggucccac

SEQ ID NO: 1651 - RNA, 20 nt, Artificial Sequence
  synthesized
ccuuguaacugggucccacu

SEQ ID NO: 1652 - RNA, 20 nt, Artificial Sequence
  synthesized
cuuguaacugggucccacuc

SEQ ID NO: 1653 - RNA, 20 nt, Artificial Sequence
  synthesized
gacccaguuacaaggggcca

SEQ ID NO: 1654 - RNA, 20 nt, Artificial Sequence
  synthesized
gacccaguuccaaggggcca

SEQ ID NO: 1655 - RNA, 20 nt, Artificial Sequence
  synthesized
gccauauuguggccccuugg

SEQ ID NO: 1656 - RNA, 20 nt, Artificial Sequence
  synthesized
gccauauuguggccccuugu

SEQ ID NO: 1657 - RNA, 20 nt, Artificial Sequence
  synthesized
gccccuuguaacuggguccc

SEQ ID NO: 1658 - RNA, 20 nt, Artificial Sequence
  synthesized
gcugagugggacccaguuac

SEQ ID NO: 1659 - RNA, 20 nt, Artificial Sequence
  synthesized
ggacccaguuacaaggggcc

SEQ ID NO: 1660 - RNA, 20 nt, Artificial Sequence
  synthesized
ggacccaguuccaaggggcc

SEQ ID NO: 1661 - RNA, 20 nt, Artificial Sequence
  synthesized
ggccccuuggaacugggucc

SEQ ID NO: 1662 - RNA, 20 nt, Artificial Sequence
  synthesized
ggccccuuguaacugggucc

SEQ ID NO: 1663 - RNA, 20 nt, Artificial Sequence
  synthesized
ggcugagugggacccaguua

SEQ ID NO: 1664 - RNA, 20 nt, Artificial Sequence
  synthesized
guaacugggucccacucagc

SEQ ID NO: 1665 - RNA, 20 nt, Artificial Sequence
  synthesized
guggccccuuggaacugggu

SEQ ID NO: 1666 - RNA, 20 nt, Artificial Sequence
  synthesized
guggccccuuguaacugggu

SEQ ID NO: 1667 - RNA, 20 nt, Artificial Sequence
  synthesized
gugggacccaguuacaaggg

SEQ ID NO: 1668 - RNA, 20 nt, Artificial Sequence
  synthesized
gugggacccaguuccaaggg

SEQ ID NO: 1669 - RNA, 20 nt, Artificial Sequence
  synthesized
uaacugggucccacucagcc

SEQ ID NO: 1670 - RNA, 20 nt, Artificial Sequence
  synthesized
uacaaggggccacaauaugg

SEQ ID NO: 1671 - RNA, 20 nt, Artificial Sequence
  synthesized
uccaaggggccacaauaugg

SEQ ID NO: 1672 - RNA, 20 nt, Artificial Sequence
  synthesized
uggccccuuggaacuggguc

SEQ ID NO: 1673 - RNA, 20 nt, Artificial Sequence
  synthesized
uggccccuuguaacuggguc

SEQ ID NO: 1674 - RNA, 20 nt, Artificial Sequence
  synthesized
ugggacccaguuacaagggg

SEQ ID NO: 1675 - RNA, 20 nt, Artificial Sequence
  synthesized
ugggacccaguuccaagggg

SEQ ID NO: 1676 - RNA, 20 nt, Artificial Sequence
  synthesized
uguaacugggucccacucag

SEQ ID NO: 1677 - RNA, 20 nt, Artificial Sequence
  synthesized
uguggccccuuggaacuggg

SEQ ID NO: 1678 - RNA, 20 nt, Artificial Sequence
  synthesized
uguggccccuuguaacuggg

SEQ ID NO: 1679 - RNA, 20 nt, Artificial Sequence
  synthesized
uuacaaggggccacaauaug

SEQ ID NO: 1680 - RNA, 20 nt, Artificial Sequence
  synthesized
uuccaaggggccacaauaug

SEQ ID NO: 1681 - RNA, 20 nt, Artificial Sequence
  synthesized
uuguaacugggucccacuca

SEQ ID NO: 1682 - RNA, 20 nt, Artificial Sequence
  synthesized
uuguggccccuuggaacugg

SEQ ID NO: 1683 - RNA, 20 nt, Artificial Sequence
  synthesized
uuguggccccuuguaacugg

SEQ ID NO: 1684 - RNA, 20 nt, Artificial Sequence
  synthesized
aagaugagacacagugggga

SEQ ID NO: 1685 - RNA, 20 nt, Artificial Sequence
  synthesized
aauggggcuaagaugagaca

SEQ ID NO: 1686 - RNA, 20 nt, Artificial Sequence
  synthesized
aauggggcugagaugagaca

SEQ ID NO: 1687 - RNA, 20 nt, Artificial Sequence
  synthesized
acugugucucaucucagccc

SEQ ID NO: 1688 - RNA, 20 nt, Artificial Sequence
  synthesized
acugugucucaucuuagccc

SEQ ID NO: 1689 - RNA, 20 nt, Artificial Sequence
  synthesized
aucucagccccauuaggaga

SEQ ID NO: 1690 - RNA, 20 nt, Artificial Sequence
  synthesized
aucuuagccccauuaggaga

SEQ ID NO: 1691 - RNA, 20 nt, Artificial Sequence
  synthesized
cacugugucucaucucagcc

SEQ ID NO: 1692 - RNA, 20 nt, Artificial Sequence
  synthesized
cacugugucucaucuuagcc

SEQ ID NO: 1693 - RNA, 20 nt, Artificial Sequence
  synthesized
cagccccauuaggagacaau

SEQ ID NO: 1694 - RNA, 20 nt, Artificial Sequence
  synthesized
caucucagccccauuaggag

SEQ ID NO: 1695 - RNA, 20 nt, Artificial Sequence
  synthesized
caucuuagccccauuaggag

SEQ ID NO: 1696 - RNA, 20 nt, Artificial Sequence
  synthesized
ccacugugucucaucucagc

SEQ ID NO: 1697 - RNA, 20 nt, Artificial Sequence
  synthesized
ccacugugucucaucuuagc

SEQ ID NO: 1698 - RNA, 20 nt, Artificial Sequence
  synthesized
cccacugugucucaucucag

SEQ ID NO: 1699 - RNA, 20 nt, Artificial Sequence
  synthesized
cccacugugucucaucuuag

SEQ ID NO: 1700 - RNA, 20 nt, Artificial Sequence
  synthesized
ccccacugugucucaucuca

SEQ ID NO: 1701 - RNA, 20 nt, Artificial Sequence
  synthesized
ccccacugugucucaucuua

SEQ ID NO: 1702 - RNA, 20 nt, Artificial Sequence
  synthesized
ccuaauggggcuaagaugag

SEQ ID NO: 1703 - RNA, 20 nt, Artificial Sequence
  synthesized
ccuaauggggcugagaugag

SEQ ID NO: 1704 - RNA, 20 nt, Artificial Sequence
  synthesized
cuaagaugagacacaguggg

SEQ ID NO: 1705 - RNA, 20 nt, Artificial Sequence
  synthesized
cuaauggggcuaagaugaga

SEQ ID NO: 1706 - RNA, 20 nt, Artificial Sequence
  synthesized
cuaauggggcugagaugaga

SEQ ID NO: 1707 - RNA, 20 nt, Artificial Sequence
  synthesized
cucagccccauuaggagaca

SEQ ID NO: 1708 - RNA, 20 nt, Artificial Sequence
  synthesized
cugagaugagacacaguggg

SEQ ID NO: 1709 - RNA, 20 nt, Artificial Sequence
  synthesized
cugugucucaucucagcccc

SEQ ID NO: 1710 - RNA, 20 nt, Artificial Sequence
  synthesized
cugugucucaucuuagcccc

SEQ ID NO: 1711 - RNA, 20 nt, Artificial Sequence
  synthesized
cuuagccccauuaggagaca

SEQ ID NO: 1712 - RNA, 20 nt, Artificial Sequence
  synthesized
gagaugagacacagugggga

SEQ ID NO: 1713 - RNA, 20 nt, Artificial Sequence
  synthesized
gugucucaucucagccccau

SEQ ID NO: 1714 - RNA, 20 nt, Artificial Sequence
  synthesized
gugucucaucuuagccccau

SEQ ID NO: 1715 - RNA, 20 nt, Artificial Sequence
  synthesized
uaagaugagacacagugggg

SEQ ID NO: 1716 - RNA, 20 nt, Artificial Sequence
  synthesized
uaauggggcuaagaugagac

SEQ ID NO: 1717 - RNA, 20 nt, Artificial Sequence
  synthesized
uaauggggcugagaugagac

SEQ ID NO: 1718 - RNA, 20 nt, Artificial Sequence
  synthesized
uagccccauuaggagacaau

SEQ ID NO: 1719 - RNA, 20 nt, Artificial Sequence
  synthesized
ucagccccauuaggagacaa

SEQ ID NO: 1720 - RNA, 20 nt, Artificial Sequence
  synthesized
uccccacugugucucaucuc

SEQ ID NO: 1721 - RNA, 20 nt, Artificial Sequence
  synthesized
uccccacugugucucaucuu

SEQ ID NO: 1722 - RNA, 20 nt, Artificial Sequence
  synthesized
uccuaauggggcuaagauga

SEQ ID NO: 1723 - RNA, 20 nt, Artificial Sequence
  synthesized
uccuaauggggcugagauga

SEQ ID NO: 1724 - RNA, 20 nt, Artificial Sequence
  synthesized
ucucaucucagccccauuag

SEQ ID NO: 1725 - RNA, 20 nt, Artificial Sequence
  synthesized
ucucaucuuagccccauuag

SEQ ID NO: 1726 - RNA, 20 nt, Artificial Sequence
  synthesized
ucuccuaauggggcuaagau

SEQ ID NO: 1727 - RNA, 20 nt, Artificial Sequence
  synthesized
ucuccuaauggggcugagau

SEQ ID NO: 1728 - RNA, 20 nt, Artificial Sequence
  synthesized
ugagaugagacacagugggg

SEQ ID NO: 1729 - RNA, 20 nt, Artificial Sequence
  synthesized
uggggcuaagaugagacaca

SEQ ID NO: 1730 - RNA, 20 nt, Artificial Sequence
  synthesized
uggggcugagaugagacaca

SEQ ID NO: 1731 - RNA, 20 nt, Artificial Sequence
  synthesized
ugucuccuaauggggcuaag

SEQ ID NO: 1732 - RNA, 20 nt, Artificial Sequence
  synthesized
ugucuccuaauggggcugag

SEQ ID NO: 1733 - RNA, 20 nt, Artificial Sequence
  synthesized
ugugucucaucucagcccca

SEQ ID NO: 1734 - RNA, 20 nt, Artificial Sequence
  synthesized
ugugucucaucuuagcccca

SEQ ID NO: 1735 - RNA, 20 nt, Artificial Sequence
  synthesized
uuagccccauuaggagacaa

SEQ ID NO: 1736 - RNA, 20 nt, Artificial Sequence
  synthesized
uugucuccuaauggggcuaa

SEQ ID NO: 1737 - RNA, 20 nt, Artificial Sequence
  synthesized
uugucuccuaauggggcuga

SEQ ID NO: 1738 - RNA, 20 nt, Artificial Sequence
  synthesized
aacaggguucccagagacca

SEQ ID NO: 1739 - RNA, 20 nt, Artificial Sequence
  synthesized
acaacaggguucccagagac

SEQ ID NO: 1740 - RNA, 20 nt, Artificial Sequence
  synthesized
acagcaggguucccagagac

SEQ ID NO: 1741 - RNA, 20 nt, Artificial Sequence
  synthesized
acaggguucccagagaccag

SEQ ID NO: 1742 - RNA, 20 nt, Artificial Sequence
  synthesized
acccugcugugagcaagaca

SEQ ID NO: 1743 - RNA, 20 nt, Artificial Sequence
  synthesized
acccuguugugagcaagaca

SEQ ID NO: 1744 - RNA, 20 nt, Artificial Sequence
  synthesized
agcaggguucccagagacca

SEQ ID NO: 1745 - RNA, 20 nt, Artificial Sequence
  synthesized
caacaggguucccagagacc

SEQ ID NO: 1746 - RNA, 20 nt, Artificial Sequence
  synthesized
cacaacaggguucccagaga

SEQ ID NO: 1747 - RNA, 20 nt, Artificial Sequence
  synthesized
cacagcaggguucccagaga

SEQ ID NO: 1748 - RNA, 20 nt, Artificial Sequence
  synthesized
cagcaggguucccagagacc

SEQ ID NO: 1749 - RNA, 20 nt, Artificial Sequence
  synthesized
cccugcugugagcaagacag

SEQ ID NO: 1750 - RNA, 20 nt, Artificial Sequence
  synthesized
cccuguugugagcaagacag

SEQ ID NO: 1751 - RNA, 20 nt, Artificial Sequence
  synthesized
ccugcugugagcaagacaga

SEQ ID NO: 1752 - RNA, 20 nt, Artificial Sequence
  synthesized
ccuguugugagcaagacaga

SEQ ID NO: 1753 - RNA, 20 nt, Artificial Sequence
  synthesized
cucacaacaggguucccaga

SEQ ID NO: 1754 - RNA, 20 nt, Artificial Sequence
  synthesized
cucacagcaggguucccaga

SEQ ID NO: 1755 - RNA, 20 nt, Artificial Sequence
  synthesized
cucugggaacccugcuguga

SEQ ID NO: 1756 - RNA, 20 nt, Artificial Sequence
  synthesized
cucugggaacccuguuguga

SEQ ID NO: 1757 - RNA, 20 nt, Artificial Sequence
  synthesized
cugcugugagcaagacagac

SEQ ID NO: 1758 - RNA, 20 nt, Artificial Sequence
  synthesized
cugggaacccugcugugagc

SEQ ID NO: 1759 - RNA, 20 nt, Artificial Sequence
  synthesized
cugggaacccuguugugagc

SEQ ID NO: 1760 - RNA, 20 nt, Artificial Sequence
  synthesized
cugucuugcucacaacaggg

SEQ ID NO: 1761 - RNA, 20 nt, Artificial Sequence
  synthesized
cugucuugcucacagcaggg

SEQ ID NO: 1762 - RNA, 20 nt, Artificial Sequence
  synthesized
cugugagcaagacagaccca

SEQ ID NO: 1763 - RNA, 20 nt, Artificial Sequence
  synthesized
cuguugugagcaagacagac

SEQ ID NO: 1764 - RNA, 20 nt, Artificial Sequence
  synthesized
cuugcucacaacaggguucc

SEQ ID NO: 1765 - RNA, 20 nt, Artificial Sequence
  synthesized
cuugcucacagcaggguucc

SEQ ID NO: 1766 - RNA, 20 nt, Artificial Sequence
  synthesized
gaacccugcugugagcaaga

SEQ ID NO: 1767 - RNA, 20 nt, Artificial Sequence
  synthesized
gaacccuguugugagcaaga

SEQ ID NO: 1768 - RNA, 20 nt, Artificial Sequence
  synthesized
gcaggguucccagagaccag

SEQ ID NO: 1769 - RNA, 20 nt, Artificial Sequence
  synthesized
gggaacccugcugugagcaa

SEQ ID NO: 1770 - RNA, 20 nt, Artificial Sequence
  synthesized
gggaacccuguugugagcaa

SEQ ID NO: 1771 - RNA, 20 nt, Artificial Sequence
  synthesized
gucucugggaacccugcugu

SEQ ID NO: 1772 - RNA, 20 nt, Artificial Sequence
  synthesized
gucucugggaacccuguugu

SEQ ID NO: 1773 - RNA, 20 nt, Artificial Sequence
  synthesized
gucugucuugcucacaacag

SEQ ID NO: 1774 - RNA, 20 nt, Artificial Sequence
  synthesized
gucugucuugcucacagcag

SEQ ID NO: 1775 - RNA, 20 nt, Artificial Sequence
  synthesized
gucuugcucacaacaggguu

SEQ ID NO: 1776 - RNA, 20 nt, Artificial Sequence
  synthesized
gucuugcucacagcaggguu

SEQ ID NO: 1777 - RNA, 20 nt, Artificial Sequence
  synthesized
ucucugggaacccugcugug

SEQ ID NO: 1778 - RNA, 20 nt, Artificial Sequence
  synthesized
ucucugggaacccuguugug

SEQ ID NO: 1779 - RNA, 20 nt, Artificial Sequence
  synthesized
ucugucuugcucacaacagg

SEQ ID NO: 1780 - RNA, 20 nt, Artificial Sequence
  synthesized
ucugucuugcucacagcagg

SEQ ID NO: 1781 - RNA, 20 nt, Artificial Sequence
  synthesized
ucuugcucacaacaggguuc

SEQ ID NO: 1782 - RNA, 20 nt, Artificial Sequence
  synthesized
ucuugcucacagcaggguuc

SEQ ID NO: 1783 - RNA, 20 nt, Artificial Sequence
  synthesized
ugcucacaacaggguuccca

SEQ ID NO: 1784 - RNA, 20 nt, Artificial Sequence
  synthesized
ugcucacagcaggguuccca

SEQ ID NO: 1785 - RNA, 20 nt, Artificial Sequence
  synthesized
ugcugugagcaagacagacc

SEQ ID NO: 1786 - RNA, 20 nt, Artificial Sequence
  synthesized
ugggucugucuugcucacaa

SEQ ID NO: 1787 - RNA, 20 nt, Artificial Sequence
  synthesized
ugggucugucuugcucacag

SEQ ID NO: 1788 - RNA, 20 nt, Artificial Sequence
  synthesized
ugucuugcucacaacagggu

SEQ ID NO: 1789 - RNA, 20 nt, Artificial Sequence
  synthesized
ugucuugcucacagcagggu

SEQ ID NO: 1790 - RNA, 20 nt, Artificial Sequence
  synthesized
uguugugagcaagacagacc

SEQ ID NO: 1791 - RNA, 20 nt, Artificial Sequence
  synthesized
uugugagcaagacagaccca

SEQ ID NO: 1792 - RNA, 20 nt, Artificial Sequence
  synthesized
acacaacaacaacacacaca

SEQ ID NO: 1793 - RNA, 20 nt, Artificial Sequence
  synthesized
acacacaacaacaacacaca

SEQ ID NO: 1794 - RNA, 20 nt, Artificial Sequence
  synthesized
acacacacaacaacaacaca

SEQ ID NO: 1795 - RNA, 20 nt, Artificial Sequence
  synthesized
acacacacacaacaacaaca

SEQ ID NO: 1796 - RNA, 20 nt, Artificial Sequence
  synthesized
guguguguguguguguuguu

SEQ ID NO: 1797 - RNA, 20 nt, Artificial Sequence
  synthesized
uguguguguguguuguuguu

SEQ ID NO: 1798 - RNA, 20 nt, Artificial Sequence
  synthesized
uguguguguguuguuguugu

SEQ ID NO: 1799 - RNA, 20 nt, Artificial Sequence
  synthesized
uguguguguuguuguugugu

SEQ ID NO: 1800 - RNA, 20 nt, Artificial Sequence
  synthesized
uguguguuguuguugugugu

SEQ ID NO: 1801 - RNA, 20 nt, Artificial Sequence
  synthesized
aaaaagcaaggugcugaggu

SEQ ID NO: 1802 - RNA, 20 nt, Artificial Sequence
  synthesized
aaaagcaaggugcugaggua

SEQ ID NO: 1803 - RNA, 20 nt, Artificial Sequence
  synthesized
aaagcaaggugcugagguac

SEQ ID NO: 1804 - RNA, 20 nt, Artificial Sequence
  synthesized
aagcaaggugcugagguacu

SEQ ID NO: 1805 - RNA, 20 nt, Artificial Sequence
  synthesized
aaggugcugagguacugcua

SEQ ID NO: 1806 - RNA, 20 nt, Artificial Sequence
  synthesized
accucagcaccuugcuuuuu

SEQ ID NO: 1807 - RNA, 20 nt, Artificial Sequence
  synthesized
accucagcaucuugcuuuuu

SEQ ID NO: 1808 - RNA, 20 nt, Artificial Sequence
  synthesized
accuugcuuuuugcauagug

SEQ ID NO: 1809 - RNA, 20 nt, Artificial Sequence
  synthesized
acuaugcaaaaagcaagaug

SEQ ID NO: 1810 - RNA, 20 nt, Artificial Sequence
  synthesized
acuaugcaaaaagcaaggug

SEQ ID NO: 1811 - RNA, 20 nt, Artificial Sequence
  synthesized
agcaaggugcugagguacug

SEQ ID NO: 1812 - RNA, 20 nt, Artificial Sequence
  synthesized
agcaccuugcuuuuugcaua

SEQ ID NO: 1813 - RNA, 20 nt, Artificial Sequence
  synthesized
agcaguaccucagcaccuug

SEQ ID NO: 1814 - RNA, 20 nt, Artificial Sequence
  synthesized
agcaucuugcuuuuugcaua

SEQ ID NO: 1815 - RNA, 20 nt, Artificial Sequence
  synthesized
aggugcugagguacugcuaa

SEQ ID NO: 1816 - RNA, 20 nt, Artificial Sequence
  synthesized
aguaccucagcaccuugcuu

SEQ ID NO: 1817 - RNA, 20 nt, Artificial Sequence
  synthesized
aucuugcuuuuugcauagug

SEQ ID NO: 1818 - RNA, 20 nt, Artificial Sequence
  synthesized
caaaaagcaaggugcugagg

SEQ ID NO: 1819 - RNA, 20 nt, Artificial Sequence
  synthesized
caaggugcugagguacugcu

SEQ ID NO: 1820 - RNA, 20 nt, Artificial Sequence
  synthesized
caccuugcuuuuugcauagu

SEQ ID NO: 1821 - RNA, 20 nt, Artificial Sequence
  synthesized
cacuaugcaaaaagcaagau

SEQ ID NO: 1822 - RNA, 20 nt, Artificial Sequence
  synthesized
cacuaugcaaaaagcaaggu

SEQ ID NO: 1823 - RNA, 20 nt, Artificial Sequence
  synthesized
caguaccucagcaccuugcu

SEQ ID NO: 1824 - RNA, 20 nt, Artificial Sequence
  synthesized
caucuugcuuuuugcauagu

SEQ ID NO: 1825 - RNA, 20 nt, Artificial Sequence
  synthesized
ccucagcaccuugcuuuuug

SEQ ID NO: 1826 - RNA, 20 nt, Artificial Sequence
  synthesized
ccucagcaucuugcuuuuug

SEQ ID NO: 1827 - RNA, 20 nt, Artificial Sequence
  synthesized
ccuugcuuuuugcauagugc

SEQ ID NO: 1828 - RNA, 20 nt, Artificial Sequence
  synthesized
cucagcaccuugcuuuuugc

SEQ ID NO: 1829 - RNA, 20 nt, Artificial Sequence
  synthesized
cucagcaucuugcuuuuugc

SEQ ID NO: 1830 - RNA, 20 nt, Artificial Sequence
  synthesized
cuuagcaguaccucagcacc

SEQ ID NO: 1831 - RNA, 20 nt, Artificial Sequence
  synthesized
gcaaaaagcaaggugcugag

SEQ ID NO: 1832 - RNA, 20 nt, Artificial Sequence
  synthesized
gcaaggugcugagguacugc

SEQ ID NO: 1833 - RNA, 20 nt, Artificial Sequence
  synthesized
gcaccuugcuuuuugcauag

SEQ ID NO: 1834 - RNA, 20 nt, Artificial Sequence
  synthesized
gcacuaugcaaaaagcaaga

SEQ ID NO: 1835 - RNA, 20 nt, Artificial Sequence
  synthesized
gcacuaugcaaaaagcaagg

SEQ ID NO: 1836 - RNA, 20 nt, Artificial Sequence
  synthesized
gcaguaccucagcaccuugc

SEQ ID NO: 1837 - RNA, 20 nt, Artificial Sequence
  synthesized
gcaucuugcuuuuugcauag

SEQ ID NO: 1838 - RNA, 20 nt, Artificial Sequence
  synthesized
gcuuagcaguaccucagcac

SEQ ID NO: 1839 - RNA, 20 nt, Artificial Sequence
  synthesized
ggugcugagguacugcuaag

SEQ ID NO: 1840 - RNA, 20 nt, Artificial Sequence
  synthesized
uaccucagcaccuugcuuuu

SEQ ID NO: 1841 - RNA, 20 nt, Artificial Sequence
  synthesized
uagcaguaccucagcaccuu

SEQ ID NO: 1842 - RNA, 20 nt, Artificial Sequence
  synthesized
uaugcaaaaagcaagaugcu

SEQ ID NO: 1843 - RNA, 20 nt, Artificial Sequence
  synthesized
uaugcaaaaagcaaggugcu

SEQ ID NO: 1844 - RNA, 20 nt, Artificial Sequence
  synthesized
ucagcaccuugcuuuuugca

SEQ ID NO: 1845 - RNA, 20 nt, Artificial Sequence
  synthesized
ucagcaucuugcuuuuugca

SEQ ID NO: 1846 - RNA, 20 nt, Artificial Sequence
  synthesized
ucuugcuuuuugcauagugc

SEQ ID NO: 1847 - RNA, 20 nt, Artificial Sequence
  synthesized
ugcaaaaagcaaggugcuga

SEQ ID NO: 1848 - RNA, 20 nt, Artificial Sequence
  synthesized
uuagcaguaccucagcaccu

SEQ ID NO: 1849 - RNA, 20 nt, Artificial Sequence
  synthesized
accaacccucugcguggcau

SEQ ID NO: 1850 - RNA, 20 nt, Artificial Sequence
  synthesized
accaacucucugcguggcau

SEQ ID NO: 1851 - RNA, 20 nt, Artificial Sequence
  synthesized
acccucugcguggcauagcc

SEQ ID NO: 1852 - RNA, 20 nt, Artificial Sequence
  synthesized
acucucugcguggcauagcc

SEQ ID NO: 1853 - RNA, 20 nt, Artificial Sequence
  synthesized
agggcuaugccacgcagaga

SEQ ID NO: 1854 - RNA, 20 nt, Artificial Sequence
  synthesized
agggcuaugccacgcagagg

SEQ ID NO: 1855 - RNA, 20 nt, Artificial Sequence
  synthesized
aguuggugaggaggugggga

SEQ ID NO: 1856 - RNA, 20 nt, Artificial Sequence
  synthesized
augccacgcagagaguuggu

SEQ ID NO: 1857 - RNA, 20 nt, Artificial Sequence
  synthesized
augccacgcagaggguuggu

SEQ ID NO: 1858 - RNA, 20 nt, Artificial Sequence
  synthesized
caacccucugcguggcauag

SEQ ID NO: 1859 - RNA, 20 nt, Artificial Sequence
  synthesized
caacucucugcguggcauag

SEQ ID NO: 1860 - RNA, 20 nt, Artificial Sequence
  synthesized
caccaacccucugcguggca

SEQ ID NO: 1861 - RNA, 20 nt, Artificial Sequence
  synthesized
caccaacucucugcguggca

SEQ ID NO: 1862 - RNA, 20 nt, Artificial Sequence
  synthesized
caccuccucaccaacccucu

SEQ ID NO: 1863 - RNA, 20 nt, Artificial Sequence
  synthesized
caccuccucaccaacucucu

SEQ ID NO: 1864 - RNA, 20 nt, Artificial Sequence
  synthesized
ccaacccucugcguggcaua

SEQ ID NO: 1865 - RNA, 20 nt, Artificial Sequence
  synthesized
ccaacucucugcguggcaua

SEQ ID NO: 1866 - RNA, 20 nt, Artificial Sequence
  synthesized
ccacgcagagaguuggugag

SEQ ID NO: 1867 - RNA, 20 nt, Artificial Sequence
  synthesized
ccacgcagaggguuggugag

SEQ ID NO: 1868 - RNA, 20 nt, Artificial Sequence
  synthesized
cccaccuccucaccaacccu

SEQ ID NO: 1869 - RNA, 20 nt, Artificial Sequence
  synthesized
cccaccuccucaccaacucu

SEQ ID NO: 1870 - RNA, 20 nt, Artificial Sequence
  synthesized
ccccaccuccucaccaaccc

SEQ ID NO: 1871 - RNA, 20 nt, Artificial Sequence
  synthesized
ccccaccuccucaccaacuc

SEQ ID NO: 1872 - RNA, 20 nt, Artificial Sequence
  synthesized
cccucugcguggcauagccc

SEQ ID NO: 1873 - RNA, 20 nt, Artificial Sequence
  synthesized
ccucaccaacccucugcgug

SEQ ID NO: 1874 - RNA, 20 nt, Artificial Sequence
  synthesized
ccucaccaacucucugcgug

SEQ ID NO: 1875 - RNA, 20 nt, Artificial Sequence
  synthesized
ccuccucaccaacccucugc

SEQ ID NO: 1876 - RNA, 20 nt, Artificial Sequence
  synthesized
ccuccucaccaacucucugc

SEQ ID NO: 1877 - RNA, 20 nt, Artificial Sequence
  synthesized
ccucugcguggcauagcccu

SEQ ID NO: 1878 - RNA, 20 nt, Artificial Sequence
  synthesized
cgcagagaguuggugaggag

SEQ ID NO: 1879 - RNA, 20 nt, Artificial Sequence
  synthesized
cgcagaggguuggugaggag

SEQ ID NO: 1880 - RNA, 20 nt, Artificial Sequence
  synthesized
cuaugccacgcagagaguug

SEQ ID NO: 1881 - RNA, 20 nt, Artificial Sequence
  synthesized
cuaugccacgcagaggguug

SEQ ID NO: 1882 - RNA, 20 nt, Artificial Sequence
  synthesized
cucucugcguggcauagccc

SEQ ID NO: 1883 - RNA, 20 nt, Artificial Sequence
  synthesized
gggcuaugccacgcagagag

SEQ ID NO: 1884 - RNA, 20 nt, Artificial Sequence
  synthesized
gggcuaugccacgcagaggg

SEQ ID NO: 1885 - RNA, 20 nt, Artificial Sequence
  synthesized
gguuggugaggaggugggga

SEQ ID NO: 1886 - RNA, 20 nt, Artificial Sequence
  synthesized
ucaccaacccucugcguggc

SEQ ID NO: 1887 - RNA, 20 nt, Artificial Sequence
  synthesized
ucaccaacucucugcguggc

SEQ ID NO: 1888 - RNA, 20 nt, Artificial Sequence
  synthesized
uccccaccuccucaccaacc

SEQ ID NO: 1889 - RNA, 20 nt, Artificial Sequence
  synthesized
uccccaccuccucaccaacu

SEQ ID NO: 1890 - RNA, 20 nt, Artificial Sequence
  synthesized
uccucaccaacccucugcgu

SEQ ID NO: 1891 - RNA, 20 nt, Artificial Sequence
  synthesized
uccucaccaacucucugcgu

SEQ ID NO: 1892 - RNA, 20 nt, Artificial Sequence
  synthesized
ucucugcguggcauagcccu

SEQ ID NO: 1893 - RNA, 20 nt, Artificial Sequence
  synthesized
aaggagguacgggccggggg

SEQ ID NO: 1894 - RNA, 20 nt, Artificial Sequence
  synthesized
aaggagguaugggccggggg

SEQ ID NO: 1895 - RNA, 20 nt, Artificial Sequence
  synthesized
accccccggcccauaccucc

SEQ ID NO: 1896 - RNA, 20 nt, Artificial Sequence
  synthesized
accccccggcccguaccucc

SEQ ID NO: 1897 - RNA, 20 nt, Artificial Sequence
  synthesized
acgggccggggggugggcgg

SEQ ID NO: 1898 - RNA, 20 nt, Artificial Sequence
  synthesized
agguacgggccggggggugg

SEQ ID NO: 1899 - RNA, 20 nt, Artificial Sequence
  synthesized
agguaugggccggggggugg

SEQ ID NO: 1900 - RNA, 20 nt, Artificial Sequence
  synthesized
auaccuccuugacggugaag

SEQ ID NO: 1901 - RNA, 20 nt, Artificial Sequence
  synthesized
augggccggggggugggcgg

SEQ ID NO: 1902 - RNA, 20 nt, Artificial Sequence
  synthesized
caccccccggcccauaccuc

SEQ ID NO: 1903 - RNA, 20 nt, Artificial Sequence
  synthesized
caccccccggcccguaccuc

SEQ ID NO: 1904 - RNA, 20 nt, Artificial Sequence
  synthesized
caccgucaaggagguacggg

SEQ ID NO: 1905 - RNA, 20 nt, Artificial Sequence
  synthesized
caccgucaaggagguauggg

SEQ ID NO: 1906 - RNA, 20 nt, Artificial Sequence
  synthesized
cauaccuccuugacggugaa

SEQ ID NO: 1907 - RNA, 20 nt, Artificial Sequence
  synthesized
ccaccccccggcccauaccu

SEQ ID NO: 1908 - RNA, 20 nt, Artificial Sequence
  synthesized
ccaccccccggcccguaccu

SEQ ID NO: 1909 - RNA, 20 nt, Artificial Sequence
  synthesized
cccaccccccggcccauacc

SEQ ID NO: 1910 - RNA, 20 nt, Artificial Sequence
  synthesized
cccaccccccggcccguacc

SEQ ID NO: 1911 - RNA, 20 nt, Artificial Sequence
  synthesized
cccauaccuccuugacggug

SEQ ID NO: 1912 - RNA, 20 nt, Artificial Sequence
  synthesized
cccccggcccauaccuccuu

SEQ ID NO: 1913 - RNA, 20 nt, Artificial Sequence
  synthesized
cccccggcccguaccuccuu

SEQ ID NO: 1914 - RNA, 20 nt, Artificial Sequence
  synthesized
ccccggcccauaccuccuug

SEQ ID NO: 1915 - RNA, 20 nt, Artificial Sequence
  synthesized
ccccggcccguaccuccuug

SEQ ID NO: 1916 - RNA, 20 nt, Artificial Sequence
  synthesized
cccguaccuccuugacggug

SEQ ID NO: 1917 - RNA, 20 nt, Artificial Sequence
  synthesized
ccgcccaccccccggcccau

SEQ ID NO: 1918 - RNA, 20 nt, Artificial Sequence
  synthesized
ccgcccaccccccggcccgu

SEQ ID NO: 1919 - RNA, 20 nt, Artificial Sequence
  synthesized
cgcccaccccccggcccaua

SEQ ID NO: 1920 - RNA, 20 nt, Artificial Sequence
  synthesized
cgcccaccccccggcccgua

SEQ ID NO: 1921 - RNA, 20 nt, Artificial Sequence
  synthesized
cggcccauaccuccuugacg

SEQ ID NO: 1922 - RNA, 20 nt, Artificial Sequence
  synthesized
cggcccguaccuccuugacg

SEQ ID NO: 1923 - RNA, 20 nt, Artificial Sequence
  synthesized
cgggccggggggugggcggc

SEQ ID NO: 1924 - RNA, 20 nt, Artificial Sequence
  synthesized
cguaccuccuugacggugaa

SEQ ID NO: 1925 - RNA, 20 nt, Artificial Sequence
  synthesized
gcccaccccccggcccauac

SEQ ID NO: 1926 - RNA, 20 nt, Artificial Sequence
  synthesized
gcccaccccccggcccguac

SEQ ID NO: 1927 - RNA, 20 nt, Artificial Sequence
  synthesized
gcccauaccuccuugacggu

SEQ ID NO: 1928 - RNA, 20 nt, Artificial Sequence
  synthesized
gcccguaccuccuugacggu

SEQ ID NO: 1929 - RNA, 20 nt, Artificial Sequence
  synthesized
gccgcccaccccccggccca

SEQ ID NO: 1930 - RNA, 20 nt, Artificial Sequence
  synthesized
gccgcccaccccccggcccg

SEQ ID NO: 1931 - RNA, 20 nt, Artificial Sequence
  synthesized
guaccuccuugacggugaag

SEQ ID NO: 1932 - RNA, 20 nt, Artificial Sequence
  synthesized
guacgggccggggggugggc

SEQ ID NO: 1933 - RNA, 20 nt, Artificial Sequence
  synthesized
guaugggccggggggugggc

SEQ ID NO: 1934 - RNA, 20 nt, Artificial Sequence
  synthesized
uacgggccggggggugggcg

SEQ ID NO: 1935 - RNA, 20 nt, Artificial Sequence
  synthesized
uaugggccggggggugggcg

SEQ ID NO: 1936 - RNA, 20 nt, Artificial Sequence
  synthesized
ucaccgucaaggagguacgg

SEQ ID NO: 1937 - RNA, 20 nt, Artificial Sequence
  synthesized
ucaccgucaaggagguaugg

SEQ ID NO: 1938 - RNA, 20 nt, Artificial Sequence
  synthesized
ugggccggggggugggcggc

SEQ ID NO: 1939 - RNA, 20 nt, Artificial Sequence
  synthesized
uucaccgucaaggagguacg

SEQ ID NO: 1940 - RNA, 20 nt, Artificial Sequence
  synthesized
uucaccgucaaggagguaug

SEQ ID NO: 1941 - RNA, 20 nt, Artificial Sequence
  synthesized
aagguguaggggaugggaga

SEQ ID NO: 1942 - RNA, 20 nt, Artificial Sequence
  synthesized
aagguguaggguaugggaga

SEQ ID NO: 1943 - RNA, 20 nt, Artificial Sequence
  synthesized
acuauaggcgucucccauac

SEQ ID NO: 1944 - RNA, 20 nt, Artificial Sequence
  synthesized
acuauaggcgucucccaucc

SEQ ID NO: 1945 - RNA, 20 nt, Artificial Sequence
  synthesized
aggcgucucccauacccuac

SEQ ID NO: 1946 - RNA, 20 nt, Artificial Sequence
  synthesized
aggcgucucccauccccuac

SEQ ID NO: 1947 - RNA, 20 nt, Artificial Sequence
  synthesized
aggggaugggagacgccuau

SEQ ID NO: 1948 - RNA, 20 nt, Artificial Sequence
  synthesized
aggguaugggagacgccuau

SEQ ID NO: 1949 - RNA, 20 nt, Artificial Sequence
  synthesized
agguguaggggaugggagac

SEQ ID NO: 1950 - RNA, 20 nt, Artificial Sequence
  synthesized
agguguaggguaugggagac

SEQ ID NO: 1951 - RNA, 20 nt, Artificial Sequence
  synthesized
auacccuacaccuuccccca

SEQ ID NO: 1952 - RNA, 20 nt, Artificial Sequence
  synthesized
auaggcgucucccauacccu

SEQ ID NO: 1953 - RNA, 20 nt, Artificial Sequence
  synthesized
auaggcgucucccauccccu

SEQ ID NO: 1954 - RNA, 20 nt, Artificial Sequence
  synthesized
auccccuacaccuuccccca

SEQ ID NO: 1955 - RNA, 20 nt, Artificial Sequence
  synthesized
ccauacccuacaccuucccc

SEQ ID NO: 1956 - RNA, 20 nt, Artificial Sequence
  synthesized
ccauccccuacaccuucccc

SEQ ID NO: 1957 - RNA, 20 nt, Artificial Sequence
  synthesized
cccauacccuacaccuuccc

SEQ ID NO: 1958 - RNA, 20 nt, Artificial Sequence
  synthesized
cccauccccuacaccuuccc

SEQ ID NO: 1959 - RNA, 20 nt, Artificial Sequence
  synthesized
cgucucccauacccuacacc

SEQ ID NO: 1960 - RNA, 20 nt, Artificial Sequence
  synthesized
cgucucccauccccuacacc

SEQ ID NO: 1961 - RNA, 20 nt, Artificial Sequence
  synthesized
cucccauacccuacaccuuc

SEQ ID NO: 1962 - RNA, 20 nt, Artificial Sequence
  synthesized
cucccauccccuacaccuuc

SEQ ID NO: 1963 - RNA, 20 nt, Artificial Sequence
  synthesized
gaagguguaggggaugggag

SEQ ID NO: 1964 - RNA, 20 nt, Artificial Sequence
  synthesized
gaagguguaggguaugggag

SEQ ID NO: 1965 - RNA, 20 nt, Artificial Sequence
  synthesized
gacuauaggcgucucccaua

SEQ ID NO: 1966 - RNA, 20 nt, Artificial Sequence
  synthesized
gacuauaggcgucucccauc

SEQ ID NO: 1967 - RNA, 20 nt, Artificial Sequence
  synthesized
gcgucucccauacccuacac

SEQ ID NO: 1968 - RNA, 20 nt, Artificial Sequence
  synthesized
gcgucucccauccccuacac

SEQ ID NO: 1969 - RNA, 20 nt, Artificial Sequence
  synthesized
gcugggggaagguguagggg

SEQ ID NO: 1970 - RNA, 20 nt, Artificial Sequence
  synthesized
gcugggggaagguguagggu

SEQ ID NO: 1971 - RNA, 20 nt, Artificial Sequence
  synthesized
ggaagguguaggggauggga

SEQ ID NO: 1972 - RNA, 20 nt, Artificial Sequence
  synthesized
ggaagguguaggguauggga

SEQ ID NO: 1973 - RNA, 20 nt, Artificial Sequence
  synthesized
ggcgucucccauacccuaca

SEQ ID NO: 1974 - RNA, 20 nt, Artificial Sequence
  synthesized
ggcgucucccauccccuaca

SEQ ID NO: 1975 - RNA, 20 nt, Artificial Sequence
  synthesized
gggaugggagacgccuauag

SEQ ID NO: 1976 - RNA, 20 nt, Artificial Sequence
  synthesized
ggggaagguguaggggaugg

SEQ ID NO: 1977 - RNA, 20 nt, Artificial Sequence
  synthesized
ggggaagguguaggguaugg

SEQ ID NO: 1978 - RNA, 20 nt, Artificial Sequence
  synthesized
gguaugggagacgccuauag

SEQ ID NO: 1979 - RNA, 20 nt, Artificial Sequence
  synthesized
gguguaggggaugggagacg

SEQ ID NO: 1980 - RNA, 20 nt, Artificial Sequence
  synthesized
gguguaggguaugggagacg

SEQ ID NO: 1981 - RNA, 20 nt, Artificial Sequence
  synthesized
guaggggaugggagacgccu

SEQ ID NO: 1982 - RNA, 20 nt, Artificial Sequence
  synthesized
guaggguaugggagacgccu

SEQ ID NO: 1983 - RNA, 20 nt, Artificial Sequence
  synthesized
gucucccauacccuacaccu

SEQ ID NO: 1984 - RNA, 20 nt, Artificial Sequence
  synthesized
gucucccauccccuacaccu

SEQ ID NO: 1985 - RNA, 20 nt, Artificial Sequence
  synthesized
guguaggggaugggagacgc

SEQ ID NO: 1986 - RNA, 20 nt, Artificial Sequence
  synthesized
guguaggguaugggagacgc

SEQ ID NO: 1987 - RNA, 20 nt, Artificial Sequence
  synthesized
uacccuacaccuucccccag

SEQ ID NO: 1988 - RNA, 20 nt, Artificial Sequence
  synthesized
uaggcgucucccauacccua

SEQ ID NO: 1989 - RNA, 20 nt, Artificial Sequence
  synthesized
uaggcgucucccauccccua

SEQ ID NO: 1990 - RNA, 20 nt, Artificial Sequence
  synthesized
uaggggaugggagacgccua

SEQ ID NO: 1991 - RNA, 20 nt, Artificial Sequence
  synthesized
uaggguaugggagacgccua

SEQ ID NO: 1992 - RNA, 20 nt, Artificial Sequence
  synthesized
uauaggcgucucccauaccc

SEQ ID NO: 1993 - RNA, 20 nt, Artificial Sequence
  synthesized
uauaggcgucucccaucccc

SEQ ID NO: 1994 - RNA, 20 nt, Artificial Sequence
  synthesized
uccccuacaccuucccccag

SEQ ID NO: 1995 - RNA, 20 nt, Artificial Sequence
  synthesized
ucucccauacccuacaccuu

SEQ ID NO: 1996 - RNA, 20 nt, Artificial Sequence
  synthesized
ucucccauccccuacaccuu

SEQ ID NO: 1997 - RNA, 20 nt, Artificial Sequence
  synthesized
aaacauggcccaagauagau

SEQ ID NO: 1998 - RNA, 20 nt, Artificial Sequence
  synthesized
aaacauggcccgagauagau

SEQ ID NO: 1999 - RNA, 20 nt, Artificial Sequence
  synthesized
aagauagaugcgggcuucca

SEQ ID NO: 2000 - RNA, 20 nt, Artificial Sequence
  synthesized
aagcccgcaucuaucucggg

SEQ ID NO: 2001 - RNA, 20 nt, Artificial Sequence
  synthesized
aagcccgcaucuaucuuggg

SEQ ID NO: 2002 - RNA, 20 nt, Artificial Sequence
  synthesized
agcccgcaucuaucucgggc

SEQ ID NO: 2003 - RNA, 20 nt, Artificial Sequence
  synthesized
agcccgcaucuaucuugggc

SEQ ID NO: 2004 - RNA, 20 nt, Artificial Sequence
  synthesized
aucuaucucgggccauguuu

SEQ ID NO: 2005 - RNA, 20 nt, Artificial Sequence
  synthesized
aucuaucuugggccauguuu

SEQ ID NO: 2006 - RNA, 20 nt, Artificial Sequence
  synthesized
aucucgggccauguuugcag

SEQ ID NO: 2007 - RNA, 20 nt, Artificial Sequence
  synthesized
aucuugggccauguuugcag

SEQ ID NO: 2008 - RNA, 20 nt, Artificial Sequence
  synthesized
auggcccaagauagaugcgg

SEQ ID NO: 2009 - RNA, 20 nt, Artificial Sequence
  synthesized
auggcccgagauagaugcgg

SEQ ID NO: 2010 - RNA, 20 nt, Artificial Sequence
  synthesized
caagauagaugcgggcuucc

SEQ ID NO: 2011 - RNA, 20 nt, Artificial Sequence
  synthesized
cauggcccaagauagaugcg

SEQ ID NO: 2012 - RNA, 20 nt, Artificial Sequence
  synthesized
cauggcccgagauagaugcg

SEQ ID NO: 2013 - RNA, 20 nt, Artificial Sequence
  synthesized
ccaagauagaugcgggcuuc

SEQ ID NO: 2014 - RNA, 20 nt, Artificial Sequence
  synthesized
cccaagauagaugcgggcuu

SEQ ID NO: 2015 - RNA, 20 nt, Artificial Sequence
  synthesized
cccgagauagaugcgggcuu

SEQ ID NO: 2016 - RNA, 20 nt, Artificial Sequence
  synthesized
cccgcaucuaucucgggcca

SEQ ID NO: 2017 - RNA, 20 nt, Artificial Sequence
  synthesized
cccgcaucuaucuugggcca

SEQ ID NO: 2018 - RNA, 20 nt, Artificial Sequence
  synthesized
ccgagauagaugcgggcuuc

SEQ ID NO: 2019 - RNA, 20 nt, Artificial Sequence
  synthesized
ccgcaucuaucucgggccau

SEQ ID NO: 2020 - RNA, 20 nt, Artificial Sequence
  synthesized
ccgcaucuaucuugggccau

SEQ ID NO: 2021 - RNA, 20 nt, Artificial Sequence
  synthesized
cgagauagaugcgggcuucc

SEQ ID NO: 2022 - RNA, 20 nt, Artificial Sequence
  synthesized
cgcaucuaucucgggccaug

SEQ ID NO: 2023 - RNA, 20 nt, Artificial Sequence
  synthesized
cgcaucuaucuugggccaug

SEQ ID NO: 2024 - RNA, 20 nt, Artificial Sequence
  synthesized
cgggccauguuugcagcacc

SEQ ID NO: 2025 - RNA, 20 nt, Artificial Sequence
  synthesized
cuaucucgggccauguuugc

SEQ ID NO: 2026 - RNA, 20 nt, Artificial Sequence
  synthesized
cuaucuugggccauguuugc

SEQ ID NO: 2027 - RNA, 20 nt, Artificial Sequence
  synthesized
gaagcccgcaucuaucucgg

SEQ ID NO: 2028 - RNA, 20 nt, Artificial Sequence
  synthesized
gaagcccgcaucuaucuugg

SEQ ID NO: 2029 - RNA, 20 nt, Artificial Sequence
  synthesized
gagauagaugcgggcuucca

SEQ ID NO: 2030 - RNA, 20 nt, Artificial Sequence
  synthesized
gcaaacauggcccaagauag

SEQ ID NO: 2031 - RNA, 20 nt, Artificial Sequence
  synthesized
gcaaacauggcccgagauag

SEQ ID NO: 2032 - RNA, 20 nt, Artificial Sequence
  synthesized
gcaucuaucucgggccaugu

SEQ ID NO: 2033 - RNA, 20 nt, Artificial Sequence
  synthesized
gcaucuaucuugggccaugu

SEQ ID NO: 2034 - RNA, 20 nt, Artificial Sequence
  synthesized
gcccaagauagaugcgggcu

SEQ ID NO: 2035 - RNA, 20 nt, Artificial Sequence
  synthesized
gcccgagauagaugcgggcu

SEQ ID NO: 2036 - RNA, 20 nt, Artificial Sequence
  synthesized
gcccgcaucuaucucgggcc

SEQ ID NO: 2037 - RNA, 20 nt, Artificial Sequence
  synthesized
gcccgcaucuaucuugggcc

SEQ ID NO: 2038 - RNA, 20 nt, Artificial Sequence
  synthesized
gcugcaaacauggcccaaga

SEQ ID NO: 2039 - RNA, 20 nt, Artificial Sequence
  synthesized
gcugcaaacauggcccgaga

SEQ ID NO: 2040 - RNA, 20 nt, Artificial Sequence
  synthesized
ggaagcccgcaucuaucucg

SEQ ID NO: 2041 - RNA, 20 nt, Artificial Sequence
  synthesized
ggaagcccgcaucuaucuug

SEQ ID NO: 2042 - RNA, 20 nt, Artificial Sequence
  synthesized
ggcccaagauagaugcgggc

SEQ ID NO: 2043 - RNA, 20 nt, Artificial Sequence
  synthesized
ggcccgagauagaugcgggc

SEQ ID NO: 2044 - RNA, 20 nt, Artificial Sequence
  synthesized
gugcugcaaacauggcccaa

SEQ ID NO: 2045 - RNA, 20 nt, Artificial Sequence
  synthesized
gugcugcaaacauggcccga

SEQ ID NO: 2046 - RNA, 20 nt, Artificial Sequence
  synthesized
uaucucgggccauguuugca

SEQ ID NO: 2047 - RNA, 20 nt, Artificial Sequence
  synthesized
uaucuugggccauguuugca

SEQ ID NO: 2048 - RNA, 20 nt, Artificial Sequence
  synthesized
ucgggccauguuugcagcac

SEQ ID NO: 2049 - RNA, 20 nt, Artificial Sequence
  synthesized
ucucgggccauguuugcagc

SEQ ID NO: 2050 - RNA, 20 nt, Artificial Sequence
  synthesized
ucuugggccauguuugcagc

SEQ ID NO: 2051 - RNA, 20 nt, Artificial Sequence
  synthesized
ugcaaacauggcccaagaua

SEQ ID NO: 2052 - RNA, 20 nt, Artificial Sequence
  synthesized
ugcaaacauggcccgagaua

SEQ ID NO: 2053 - RNA, 20 nt, Artificial Sequence
  synthesized
ugcugcaaacauggcccaag

SEQ ID NO: 2054 - RNA, 20 nt, Artificial Sequence
  synthesized
ugcugcaaacauggcccgag

SEQ ID NO: 2055 - RNA, 20 nt, Artificial Sequence
  synthesized
uggcccaagauagaugcggg

SEQ ID NO: 2056 - RNA, 20 nt, Artificial Sequence
  synthesized
uggcccgagauagaugcggg

SEQ ID NO: 2057 - RNA, 20 nt, Artificial Sequence
  synthesized
ugggccauguuugcagcacc

SEQ ID NO: 2058 - RNA, 20 nt, Artificial Sequence
  synthesized
uugggccauguuugcagcac

SEQ ID NO: 2059 - RNA, 20 nt, Artificial Sequence
  synthesized
aagaaugcugcgaaggccug

SEQ ID NO: 2060 - RNA, 20 nt, Artificial Sequence
  synthesized
aagaaugcugugaaggccug

SEQ ID NO: 2061 - RNA, 20 nt, Artificial Sequence
  synthesized
aaugcugcgaaggccugagc

SEQ ID NO: 2062 - RNA, 20 nt, Artificial Sequence
  synthesized
aaugcugugaaggccugagc

SEQ ID NO: 2063 - RNA, 20 nt, Artificial Sequence
  synthesized
acagcauucuugggugggag

SEQ ID NO: 2064 - RNA, 20 nt, Artificial Sequence
  synthesized
acccaagaaugcugcgaagg

SEQ ID NO: 2065 - RNA, 20 nt, Artificial Sequence
  synthesized
acccaagaaugcugugaagg

SEQ ID NO: 2066 - RNA, 20 nt, Artificial Sequence
  synthesized
agaaugcugcgaaggccuga

SEQ ID NO: 2067 - RNA, 20 nt, Artificial Sequence
  synthesized
agaaugcugugaaggccuga

SEQ ID NO: 2068 - RNA, 20 nt, Artificial Sequence
  synthesized
agcucaggccuucacagcau

SEQ ID NO: 2069 - RNA, 20 nt, Artificial Sequence
  synthesized
agcucaggccuucgcagcau

SEQ ID NO: 2070 - RNA, 20 nt, Artificial Sequence
  synthesized
augcugcgaaggccugagcu

SEQ ID NO: 2071 - RNA, 20 nt, Artificial Sequence
  synthesized
augcugugaaggccugagcu

SEQ ID NO: 2072 - RNA, 20 nt, Artificial Sequence
  synthesized
caagaaugcugcgaaggccu

SEQ ID NO: 2073 - RNA, 20 nt, Artificial Sequence
  synthesized
caagaaugcugugaaggccu

SEQ ID NO: 2074 - RNA, 20 nt, Artificial Sequence
  synthesized
cacagcauucuuggguggga

SEQ ID NO: 2075 - RNA, 20 nt, Artificial Sequence
  synthesized
cacccaagaaugcugcgaag

SEQ ID NO: 2076 - RNA, 20 nt, Artificial Sequence
  synthesized
cacccaagaaugcugugaag

SEQ ID NO: 2077 - RNA, 20 nt, Artificial Sequence
  synthesized
ccacccaagaaugcugcgaa

SEQ ID NO: 2078 - RNA, 20 nt, Artificial Sequence
  synthesized
ccacccaagaaugcugugaa

SEQ ID NO: 2079 - RNA, 20 nt, Artificial Sequence
  synthesized
cccaagaaugcugcgaaggc

SEQ ID NO: 2080 - RNA, 20 nt, Artificial Sequence
  synthesized
cccaagaaugcugugaaggc

SEQ ID NO: 2081 - RNA, 20 nt, Artificial Sequence
  synthesized
cgaaggccugagcucagcca

SEQ ID NO: 2082 - RNA, 20 nt, Artificial Sequence
  synthesized
cgcagcauucuuggguggga

SEQ ID NO: 2083 - RNA, 20 nt, Artificial Sequence
  synthesized
cucaggccuucacagcauuc

SEQ ID NO: 2084 - RNA, 20 nt, Artificial Sequence
  synthesized
cucaggccuucgcagcauuc

SEQ ID NO: 2085 - RNA, 20 nt, Artificial Sequence
  synthesized
cugagcucaggccuucacag

SEQ ID NO: 2086 - RNA, 20 nt, Artificial Sequence
  synthesized
cugagcucaggccuucgcag

SEQ ID NO: 2087 - RNA, 20 nt, Artificial Sequence
  synthesized
cugcgaaggccugagcucag

SEQ ID NO: 2088 - RNA, 20 nt, Artificial Sequence
  synthesized
cugugaaggccugagcucag

SEQ ID NO: 2089 - RNA, 20 nt, Artificial Sequence
  synthesized
gagcucaggccuucacagca

SEQ ID NO: 2090 - RNA, 20 nt, Artificial Sequence
  synthesized
gagcucaggccuucgcagca

SEQ ID NO: 2091 - RNA, 20 nt, Artificial Sequence
  synthesized
gcagcauucuugggugggag

SEQ ID NO: 2092 - RNA, 20 nt, Artificial Sequence
  synthesized
gcgaaggccugagcucagcc

SEQ ID NO: 2093 - RNA, 20 nt, Artificial Sequence
  synthesized
gcucaggccuucacagcauu

SEQ ID NO: 2094 - RNA, 20 nt, Artificial Sequence
  synthesized
gcucaggccuucgcagcauu

SEQ ID NO: 2095 - RNA, 20 nt, Artificial Sequence
  synthesized
gcugagcucaggccuucaca

SEQ ID NO: 2096 - RNA, 20 nt, Artificial Sequence
  synthesized
gcugagcucaggccuucgca

SEQ ID NO: 2097 - RNA, 20 nt, Artificial Sequence
  synthesized
gcugcgaaggccugagcuca

SEQ ID NO: 2098 - RNA, 20 nt, Artificial Sequence
  synthesized
gcugugaaggccugagcuca

SEQ ID NO: 2099 - RNA, 20 nt, Artificial Sequence
  synthesized
ggccuucacagcauucuugg

SEQ ID NO: 2100 - RNA, 20 nt, Artificial Sequence
  synthesized
ggccuucgcagcauucuugg

SEQ ID NO: 2101 - RNA, 20 nt, Artificial Sequence
  synthesized
ggcugagcucaggccuucac

SEQ ID NO: 2102 - RNA, 20 nt, Artificial Sequence
  synthesized
ggcugagcucaggccuucgc

SEQ ID NO: 2103 - RNA, 20 nt, Artificial Sequence
  synthesized
gugaaggccugagcucagcc

SEQ ID NO: 2104 - RNA, 20 nt, Artificial Sequence
  synthesized
ucccacccaagaaugcugcg

SEQ ID NO: 2105 - RNA, 20 nt, Artificial Sequence
  synthesized
ucccacccaagaaugcugug

SEQ ID NO: 2106 - RNA, 20 nt, Artificial Sequence
  synthesized
ugaaggccugagcucagcca

SEQ ID NO: 2107 - RNA, 20 nt, Artificial Sequence
  synthesized
ugagcucaggccuucacagc

SEQ ID NO: 2108 - RNA, 20 nt, Artificial Sequence
  synthesized
ugagcucaggccuucgcagc

SEQ ID NO: 2109 - RNA, 20 nt, Artificial Sequence
  synthesized
ugcgaaggccugagcucagc

SEQ ID NO: 2110 - RNA, 20 nt, Artificial Sequence
  synthesized
ugcugcgaaggccugagcuc

SEQ ID NO: 2111 - RNA, 20 nt, Artificial Sequence
  synthesized
ugcugugaaggccugagcuc

SEQ ID NO: 2112 - RNA, 20 nt, Artificial Sequence
  synthesized
uggcugagcucaggccuuca

SEQ ID NO: 2113 - RNA, 20 nt, Artificial Sequence
  synthesized
uggcugagcucaggccuucg

SEQ ID NO: 2114 - RNA, 20 nt, Artificial Sequence
  synthesized
ugugaaggccugagcucagc

SEQ ID NO: 2115 - RNA, 20 nt, Artificial Sequence
  synthesized
uucacagcauucuugggugg

SEQ ID NO: 2116 - RNA, 20 nt, Artificial Sequence
  synthesized
uucgcagcauucuugggugg

SEQ ID NO: 2117 - RNA, 20 nt, Artificial Sequence
  synthesized
aagagcacugucaccucagu

SEQ ID NO: 2118 - RNA, 20 nt, Artificial Sequence
  synthesized
aagagcauugucaccucagu

SEQ ID NO: 2119 - RNA, 20 nt, Artificial Sequence
  synthesized
aauaaagagcacugucaccu

SEQ ID NO: 2120 - RNA, 20 nt, Artificial Sequence
  synthesized
aauaaagagcauugucaccu

SEQ ID NO: 2121 - RNA, 20 nt, Artificial Sequence
  synthesized
acaaugcucuuuauucugua

SEQ ID NO: 2122 - RNA, 20 nt, Artificial Sequence
  synthesized
acagaauaaagagcacuguc

SEQ ID NO: 2123 - RNA, 20 nt, Artificial Sequence
  synthesized
acagaauaaagagcauuguc

SEQ ID NO: 2124 - RNA, 20 nt, Artificial Sequence
  synthesized
acagugcucuuuauucugua

SEQ ID NO: 2125 - RNA, 20 nt, Artificial Sequence
  synthesized
acugaggugacaaugcucuu

SEQ ID NO: 2126 - RNA, 20 nt, Artificial Sequence
  synthesized
acugaggugacagugcucuu

SEQ ID NO: 2127 - RNA, 20 nt, Artificial Sequence
  synthesized
acugucaccucagugauggc

SEQ ID NO: 2128 - RNA, 20 nt, Artificial Sequence
  synthesized
agaauaaagagcacugucac

SEQ ID NO: 2129 - RNA, 20 nt, Artificial Sequence
  synthesized
agaauaaagagcauugucac

SEQ ID NO: 2130 - RNA, 20 nt, Artificial Sequence
  synthesized
agagcacugucaccucagug

SEQ ID NO: 2131 - RNA, 20 nt, Artificial Sequence
  synthesized
agagcauugucaccucagug

SEQ ID NO: 2132 - RNA, 20 nt, Artificial Sequence
  synthesized
agcacugucaccucagugau

SEQ ID NO: 2133 - RNA, 20 nt, Artificial Sequence
  synthesized
agcauugucaccucagugau

SEQ ID NO: 2134 - RNA, 20 nt, Artificial Sequence
  synthesized
agccaucacugaggugacaa

SEQ ID NO: 2135 - RNA, 20 nt, Artificial Sequence
  synthesized
agccaucacugaggugacag

SEQ ID NO: 2136 - RNA, 20 nt, Artificial Sequence
  synthesized
aggugacaaugcucuuuauu

SEQ ID NO: 2137 - RNA, 20 nt, Artificial Sequence
  synthesized
aggugacagugcucuuuauu

SEQ ID NO: 2138 - RNA, 20 nt, Artificial Sequence
  synthesized
agugcucuuuauucuguaaa

SEQ ID NO: 2139 - RNA, 20 nt, Artificial Sequence
  synthesized
aucacugaggugacaaugcu

SEQ ID NO: 2140 - RNA, 20 nt, Artificial Sequence
  synthesized
aucacugaggugacagugcu

SEQ ID NO: 2141 - RNA, 20 nt, Artificial Sequence
  synthesized
augcucuuuauucuguaaag

SEQ ID NO: 2142 - RNA, 20 nt, Artificial Sequence
  synthesized
auugucaccucagugauggc

SEQ ID NO: 2143 - RNA, 20 nt, Artificial Sequence
  synthesized
caaugcucuuuauucuguaa

SEQ ID NO: 2144 - RNA, 20 nt, Artificial Sequence
  synthesized
cacugaggugacaaugcucu

SEQ ID NO: 2145 - RNA, 20 nt, Artificial Sequence
  synthesized
cacugaggugacagugcucu

SEQ ID NO: 2146 - RNA, 20 nt, Artificial Sequence
  synthesized
cacugucaccucagugaugg

SEQ ID NO: 2147 - RNA, 20 nt, Artificial Sequence
  synthesized
cagaauaaagagcacuguca

SEQ ID NO: 2148 - RNA, 20 nt, Artificial Sequence
  synthesized
cagaauaaagagcauuguca

SEQ ID NO: 2149 - RNA, 20 nt, Artificial Sequence
  synthesized
cagugcucuuuauucuguaa

SEQ ID NO: 2150 - RNA, 20 nt, Artificial Sequence
  synthesized
caucacugaggugacaaugc

SEQ ID NO: 2151 - RNA, 20 nt, Artificial Sequence
  synthesized
caucacugaggugacagugc

SEQ ID NO: 2152 - RNA, 20 nt, Artificial Sequence
  synthesized
cauugucaccucagugaugg

SEQ ID NO: 2153 - RNA, 20 nt, Artificial Sequence
  synthesized
ccaucacugaggugacaaug

SEQ ID NO: 2154 - RNA, 20 nt, Artificial Sequence
  synthesized
ccaucacugaggugacagug

SEQ ID NO: 2155 - RNA, 20 nt, Artificial Sequence
  synthesized
cugaggugacaaugcucuuu

SEQ ID NO: 2156 - RNA, 20 nt, Artificial Sequence
  synthesized
cugaggugacagugcucuuu

SEQ ID NO: 2157 - RNA, 20 nt, Artificial Sequence
  synthesized
cugucaccucagugauggcu

SEQ ID NO: 2158 - RNA, 20 nt, Artificial Sequence
  synthesized
gaauaaagagcacugucacc

SEQ ID NO: 2159 - RNA, 20 nt, Artificial Sequence
  synthesized
gaauaaagagcauugucacc

SEQ ID NO: 2160 - RNA, 20 nt, Artificial Sequence
  synthesized
gacaaugcucuuuauucugu

SEQ ID NO: 2161 - RNA, 20 nt, Artificial Sequence
  synthesized
gacagugcucuuuauucugu

SEQ ID NO: 2162 - RNA, 20 nt, Artificial Sequence
  synthesized
gaggugacaaugcucuuuau

SEQ ID NO: 2163 - RNA, 20 nt, Artificial Sequence
  synthesized
gaggugacagugcucuuuau

SEQ ID NO: 2164 - RNA, 20 nt, Artificial Sequence
  synthesized
gcacugucaccucagugaug

SEQ ID NO: 2165 - RNA, 20 nt, Artificial Sequence
  synthesized
gcauugucaccucagugaug

SEQ ID NO: 2166 - RNA, 20 nt, Artificial Sequence
  synthesized
gccaucacugaggugacaau

SEQ ID NO: 2167 - RNA, 20 nt, Artificial Sequence
  synthesized
gccaucacugaggugacagu

SEQ ID NO: 2168 - RNA, 20 nt, Artificial Sequence
  synthesized
ggugacaaugcucuuuauuc

SEQ ID NO: 2169 - RNA, 20 nt, Artificial Sequence
  synthesized
ggugacagugcucuuuauuc

SEQ ID NO: 2170 - RNA, 20 nt, Artificial Sequence
  synthesized
gugacaaugcucuuuauucu

SEQ ID NO: 2171 - RNA, 20 nt, Artificial Sequence
  synthesized
gugacagugcucuuuauucu

SEQ ID NO: 2172 - RNA, 20 nt, Artificial Sequence
  synthesized
gugcucuuuauucuguaaag

SEQ ID NO: 2173 - RNA, 20 nt, Artificial Sequence
  synthesized
uaaagagcacugucaccuca

SEQ ID NO: 2174 - RNA, 20 nt, Artificial Sequence
  synthesized
uaaagagcauugucaccuca

SEQ ID NO: 2175 - RNA, 20 nt, Artificial Sequence
  synthesized
uacagaauaaagagcacugu

SEQ ID NO: 2176 - RNA, 20 nt, Artificial Sequence
  synthesized
uacagaauaaagagcauugu

SEQ ID NO: 2177 - RNA, 20 nt, Artificial Sequence
  synthesized
ucacugaggugacaaugcuc

SEQ ID NO: 2178 - RNA, 20 nt, Artificial Sequence
  synthesized
ucacugaggugacagugcuc

SEQ ID NO: 2179 - RNA, 20 nt, Artificial Sequence
  synthesized
ugacaaugcucuuuauucug

SEQ ID NO: 2180 - RNA, 20 nt, Artificial Sequence
  synthesized
ugacagugcucuuuauucug

SEQ ID NO: 2181 - RNA, 20 nt, Artificial Sequence
  synthesized
ugaggugacaaugcucuuua

SEQ ID NO: 2182 - RNA, 20 nt, Artificial Sequence
  synthesized
ugaggugacagugcucuuua

SEQ ID NO: 2183 - RNA, 20 nt, Artificial Sequence
  synthesized
uuacagaauaaagagcacug

SEQ ID NO: 2184 - RNA, 20 nt, Artificial Sequence
  synthesized
uuacagaauaaagagcauug

SEQ ID NO: 2185 - RNA, 20 nt, Artificial Sequence
  synthesized
uugucaccucagugauggcu

SEQ ID NO: 2186 - RNA, 20 nt, Artificial Sequence
  synthesized
uuuacagaauaaagagcacu

SEQ ID NO: 2187 - RNA, 20 nt, Artificial Sequence
  synthesized
aacugggucccacucagccu

SEQ ID NO: 2188 - RNA, 20 nt, Artificial Sequence
  synthesized
aacugggucccacuuagccu

SEQ ID NO: 2189 - RNA, 20 nt, Artificial Sequence
  synthesized
acucagccucuaggcgauug

SEQ ID NO: 2190 - RNA, 20 nt, Artificial Sequence
  synthesized
acugggucccacucagccuc

SEQ ID NO: 2191 - RNA, 20 nt, Artificial Sequence
  synthesized
acugggucccacuuagccuc

SEQ ID NO: 2192 - RNA, 20 nt, Artificial Sequence
  synthesized
acuuagccucuaggcgauug

SEQ ID NO: 2193 - RNA, 20 nt, Artificial Sequence
  synthesized
agaggcuaagugggacccag

SEQ ID NO: 2194 - RNA, 20 nt, Artificial Sequence
  synthesized
aggcuaagugggacccaguu

SEQ ID NO: 2195 - RNA, 20 nt, Artificial Sequence
  synthesized
aucgccuagaggcuaagugg

SEQ ID NO: 2196 - RNA, 20 nt, Artificial Sequence
  synthesized
aucgccuagaggcugagugg

SEQ ID NO: 2197 - RNA, 20 nt, Artificial Sequence
  synthesized
cacucagccucuaggcgauu

SEQ ID NO: 2198 - RNA, 20 nt, Artificial Sequence
  synthesized
cacuuagccucuaggcgauu

SEQ ID NO: 2199 - RNA, 20 nt, Artificial Sequence
  synthesized
cagccucuaggcgauugucu

SEQ ID NO: 2200 - RNA, 20 nt, Artificial Sequence
  synthesized
ccacucagccucuaggcgau

SEQ ID NO: 2201 - RNA, 20 nt, Artificial Sequence
  synthesized
ccacuuagccucuaggcgau

SEQ ID NO: 2202 - RNA, 20 nt, Artificial Sequence
  synthesized
cccacucagccucuaggcga

SEQ ID NO: 2203 - RNA, 20 nt, Artificial Sequence
  synthesized
cccacuuagccucuaggcga

SEQ ID NO: 2204 - RNA, 20 nt, Artificial Sequence
  synthesized
ccuagaggcuaagugggacc

SEQ ID NO: 2205 - RNA, 20 nt, Artificial Sequence
  synthesized
ccuagaggcugagugggacc

SEQ ID NO: 2206 - RNA, 20 nt, Artificial Sequence
  synthesized
cgccuagaggcuaaguggga

SEQ ID NO: 2207 - RNA, 20 nt, Artificial Sequence
  synthesized
cgccuagaggcugaguggga

SEQ ID NO: 2208 - RNA, 20 nt, Artificial Sequence
  synthesized
cuagaggcuaagugggaccc

SEQ ID NO: 2209 - RNA, 20 nt, Artificial Sequence
  synthesized
cuagaggcugagugggaccc

SEQ ID NO: 2210 - RNA, 20 nt, Artificial Sequence
  synthesized
cucagccucuaggcgauugu

SEQ ID NO: 2211 - RNA, 20 nt, Artificial Sequence
  synthesized
cuuagccucuaggcgauugu

SEQ ID NO: 2212 - RNA, 20 nt, Artificial Sequence
  synthesized
cuuggaacugggucccacuu

SEQ ID NO: 2213 - RNA, 20 nt, Artificial Sequence
  synthesized
gaacugggucccacuuagcc

SEQ ID NO: 2214 - RNA, 20 nt, Artificial Sequence
  synthesized
gacaaucgccuagaggcuaa

SEQ ID NO: 2215 - RNA, 20 nt, Artificial Sequence
  synthesized
gacaaucgccuagaggcuga

SEQ ID NO: 2216 - RNA, 20 nt, Artificial Sequence
  synthesized
gaggcuaagugggacccagu

SEQ ID NO: 2217 - RNA, 20 nt, Artificial Sequence
  synthesized
gccuagaggcuaagugggac

SEQ ID NO: 2218 - RNA, 20 nt, Artificial Sequence
  synthesized
gccuagaggcugagugggac

SEQ ID NO: 2219 - RNA, 20 nt, Artificial Sequence
  synthesized
gcuaagugggacccaguucc

SEQ ID NO: 2220 - RNA, 20 nt, Artificial Sequence
  synthesized
ggaacugggucccacuuagc

SEQ ID NO: 2221 - RNA, 20 nt, Artificial Sequence
  synthesized
ggcuaagugggacccaguuc

SEQ ID NO: 2222 - RNA, 20 nt, Artificial Sequence
  synthesized
gggucccacucagccucuag

SEQ ID NO: 2223 - RNA, 20 nt, Artificial Sequence
  synthesized
gggucccacuuagccucuag

SEQ ID NO: 2224 - RNA, 20 nt, Artificial Sequence
  synthesized
gucccacucagccucuaggc

SEQ ID NO: 2225 - RNA, 20 nt, Artificial Sequence
  synthesized
gucccacuuagccucuaggc

SEQ ID NO: 2226 - RNA, 20 nt, Artificial Sequence
  synthesized
uagaggcuaagugggaccca

SEQ ID NO: 2227 - RNA, 20 nt, Artificial Sequence
  synthesized
uagccucuaggcgauugucu

SEQ ID NO: 2228 - RNA, 20 nt, Artificial Sequence
  synthesized
ucagccucuaggcgauuguc

SEQ ID NO: 2229 - RNA, 20 nt, Artificial Sequence
  synthesized
ucccacucagccucuaggcg

SEQ ID NO: 2230 - RNA, 20 nt, Artificial Sequence
  synthesized
ucccacuuagccucuaggcg

SEQ ID NO: 2231 - RNA, 20 nt, Artificial Sequence
  synthesized
ucgccuagaggcuaaguggg

SEQ ID NO: 2232 - RNA, 20 nt, Artificial Sequence
  synthesized
ucgccuagaggcugaguggg

SEQ ID NO: 2233 - RNA, 20 nt, Artificial Sequence
  synthesized
uggaacugggucccacuuag

SEQ ID NO: 2234 - RNA, 20 nt, Artificial Sequence
  synthesized
uuagccucuaggcgauuguc

SEQ ID NO: 2235 - RNA, 20 nt, Artificial Sequence
  synthesized
uuggaacugggucccacuua

SEQ ID NO: 2236 - RNA, 20 nt, Artificial Sequence
  synthesized
aacucaagccucuugccuuc

SEQ ID NO: 2237 - RNA, 20 nt, Artificial Sequence
  synthesized
agcccuggcccuaacucaag

SEQ ID NO: 2238 - RNA, 20 nt, Artificial Sequence
  synthesized
agcccuggcccugacucaag

SEQ ID NO: 2239 - RNA, 20 nt, Artificial Sequence
  synthesized
aggcaagaggcuugagucag

SEQ ID NO: 2240 - RNA, 20 nt, Artificial Sequence
  synthesized
aggcaagaggcuugaguuag

SEQ ID NO: 2241 - RNA, 20 nt, Artificial Sequence
  synthesized
aggcuugagucagggccagg

SEQ ID NO: 2242 - RNA, 20 nt, Artificial Sequence
  synthesized
aggcuugaguuagggccagg

SEQ ID NO: 2243 - RNA, 20 nt, Artificial Sequence
  synthesized
agucagggccagggcugccc

SEQ ID NO: 2244 - RNA, 20 nt, Artificial Sequence
  synthesized
aguuagggccagggcugccc

SEQ ID NO: 2245 - RNA, 20 nt, Artificial Sequence
  synthesized
caagaggcuugagucagggc

SEQ ID NO: 2246 - RNA, 20 nt, Artificial Sequence
  synthesized
caagaggcuugaguuagggc

SEQ ID NO: 2247 - RNA, 20 nt, Artificial Sequence
  synthesized
cagcccuggcccuaacucaa

SEQ ID NO: 2248 - RNA, 20 nt, Artificial Sequence
  synthesized
cagcccuggcccugacucaa

SEQ ID NO: 2249 - RNA, 20 nt, Artificial Sequence
  synthesized
cagggccagggcugcccaca

SEQ ID NO: 2250 - RNA, 20 nt, Artificial Sequence
  synthesized
cccuaacucaagccucuugc

SEQ ID NO: 2251 - RNA, 20 nt, Artificial Sequence
  synthesized
cccugacucaagccucuugc

SEQ ID NO: 2252 - RNA, 20 nt, Artificial Sequence
  synthesized
cccuggcccuaacucaagcc

SEQ ID NO: 2253 - RNA, 20 nt, Artificial Sequence
  synthesized
cccuggcccugacucaagcc

SEQ ID NO: 2254 - RNA, 20 nt, Artificial Sequence
  synthesized
ccuaacucaagccucuugcc

SEQ ID NO: 2255 - RNA, 20 nt, Artificial Sequence
  synthesized
ccugacucaagccucuugcc

SEQ ID NO: 2256 - RNA, 20 nt, Artificial Sequence
  synthesized
ccuggcccuaacucaagccu

SEQ ID NO: 2257 - RNA, 20 nt, Artificial Sequence
  synthesized
ccuggcccugacucaagccu

SEQ ID NO: 2258 - RNA, 20 nt, Artificial Sequence
  synthesized
cuaacucaagccucuugccu

SEQ ID NO: 2259 - RNA, 20 nt, Artificial Sequence
  synthesized
cugacucaagccucuugccu

SEQ ID NO: 2260 - RNA, 20 nt, Artificial Sequence
  synthesized
cuggcccuaacucaagccuc

SEQ ID NO: 2261 - RNA, 20 nt, Artificial Sequence
  synthesized
cuggcccugacucaagccuc

SEQ ID NO: 2262 - RNA, 20 nt, Artificial Sequence
  synthesized
gacucaagccucuugccuuc

SEQ ID NO: 2263 - RNA, 20 nt, Artificial Sequence
  synthesized
gaggcuugagucagggccag

SEQ ID NO: 2264 - RNA, 20 nt, Artificial Sequence
  synthesized
gaggcuugaguuagggccag

SEQ ID NO: 2265 - RNA, 20 nt, Artificial Sequence
  synthesized
gagucagggccagggcugcc

SEQ ID NO: 2266 - RNA, 20 nt, Artificial Sequence
  synthesized
gaguuagggccagggcugcc

SEQ ID NO: 2267 - RNA, 20 nt, Artificial Sequence
  synthesized
gcaagaggcuugagucaggg

SEQ ID NO: 2268 - RNA, 20 nt, Artificial Sequence
  synthesized
gcaagaggcuugaguuaggg

SEQ ID NO: 2269 - RNA, 20 nt, Artificial Sequence
  synthesized
gcagcccuggcccuaacuca

SEQ ID NO: 2270 - RNA, 20 nt, Artificial Sequence
  synthesized
gcagcccuggcccugacuca

SEQ ID NO: 2271 - RNA, 20 nt, Artificial Sequence
  synthesized
gcccuaacucaagccucuug

SEQ ID NO: 2272 - RNA, 20 nt, Artificial Sequence
  synthesized
gcccugacucaagccucuug

SEQ ID NO: 2273 - RNA, 20 nt, Artificial Sequence
  synthesized
gcccuggcccuaacucaagc

SEQ ID NO: 2274 - RNA, 20 nt, Artificial Sequence
  synthesized
gcccuggcccugacucaagc

SEQ ID NO: 2275 - RNA, 20 nt, Artificial Sequence
  synthesized
gcuugagucagggccagggc

SEQ ID NO: 2276 - RNA, 20 nt, Artificial Sequence
  synthesized
gcuugaguuagggccagggc

SEQ ID NO: 2277 - RNA, 20 nt, Artificial Sequence
  synthesized
ggcaagaggcuugagucagg

SEQ ID NO: 2278 - RNA, 20 nt, Artificial Sequence
  synthesized
ggcaagaggcuugaguuagg

SEQ ID NO: 2279 - RNA, 20 nt, Artificial Sequence
  synthesized
ggcagcccuggcccuaacuc

SEQ ID NO: 2280 - RNA, 20 nt, Artificial Sequence
  synthesized
ggcagcccuggcccugacuc

SEQ ID NO: 2281 - RNA, 20 nt, Artificial Sequence
  synthesized
ggcccuaacucaagccucuu

SEQ ID NO: 2282 - RNA, 20 nt, Artificial Sequence
  synthesized
ggcccugacucaagccucuu

SEQ ID NO: 2283 - RNA, 20 nt, Artificial Sequence
  synthesized
ggcuugagucagggccaggg

SEQ ID NO: 2284 - RNA, 20 nt, Artificial Sequence
  synthesized
ggcuugaguuagggccaggg

SEQ ID NO: 2285 - RNA, 20 nt, Artificial Sequence
  synthesized
gggcagcccuggcccuaacu

SEQ ID NO: 2286 - RNA, 20 nt, Artificial Sequence
  synthesized
gggcagcccuggcccugacu

SEQ ID NO: 2287 - RNA, 20 nt, Artificial Sequence
  synthesized
gucagggccagggcugccca

SEQ ID NO: 2288 - RNA, 20 nt, Artificial Sequence
  synthesized
gugggcagcccuggcccuaa

SEQ ID NO: 2289 - RNA, 20 nt, Artificial Sequence
  synthesized
gugggcagcccuggcccuga

SEQ ID NO: 2290 - RNA, 20 nt, Artificial Sequence
  synthesized
guuagggccagggcugccca

SEQ ID NO: 2291 - RNA, 20 nt, Artificial Sequence
  synthesized
uaacucaagccucuugccuu

SEQ ID NO: 2292 - RNA, 20 nt, Artificial Sequence
  synthesized
uagggccagggcugcccaca

SEQ ID NO: 2293 - RNA, 20 nt, Artificial Sequence
  synthesized
ugacucaagccucuugccuu

SEQ ID NO: 2294 - RNA, 20 nt, Artificial Sequence
  synthesized
ugagucagggccagggcugc

SEQ ID NO: 2295 - RNA, 20 nt, Artificial Sequence
  synthesized
ugaguuagggccagggcugc

SEQ ID NO: 2296 - RNA, 20 nt, Artificial Sequence
  synthesized
uggcccuaacucaagccucu

SEQ ID NO: 2297 - RNA, 20 nt, Artificial Sequence
  synthesized
uggcccugacucaagccucu

SEQ ID NO: 2298 - RNA, 20 nt, Artificial Sequence
  synthesized
ugugggcagcccuggcccua

SEQ ID NO: 2299 - RNA, 20 nt, Artificial Sequence
  synthesized
ugugggcagcccuggcccug

SEQ ID NO: 2300 - RNA, 20 nt, Artificial Sequence
  synthesized
uugagucagggccagggcug

SEQ ID NO: 2301 - RNA, 20 nt, Artificial Sequence
  synthesized
uugaguuagggccagggcug

SEQ ID NO: 2302 - RNA, 20 nt, Artificial Sequence
  synthesized
aacacccaacaauggccaga

SEQ ID NO: 2303 - RNA, 20 nt, Artificial Sequence
  synthesized
aacacccaacaauggccagc

SEQ ID NO: 2304 - RNA, 20 nt, Artificial Sequence
  synthesized
aaucgcuggccauuguuggg

SEQ ID NO: 2305 - RNA, 20 nt, Artificial Sequence
  synthesized
aaucucuggccauuguuggg

SEQ ID NO: 2306 - RNA, 20 nt, Artificial Sequence
  synthesized
aauggccagagauucccuga

SEQ ID NO: 2307 - RNA, 20 nt, Artificial Sequence
  synthesized
aauggccagcgauucccuga

SEQ ID NO: 2308 - RNA, 20 nt, Artificial Sequence
  synthesized
acaauggccagagauucccu

SEQ ID NO: 2309 - RNA, 20 nt, Artificial Sequence
  synthesized
acaauggccagcgauucccu

SEQ ID NO: 2310 - RNA, 20 nt, Artificial Sequence
  synthesized
acacccaacaauggccagag

SEQ ID NO: 2311 - RNA, 20 nt, Artificial Sequence
  synthesized
acacccaacaauggccagcg

SEQ ID NO: 2312 - RNA, 20 nt, Artificial Sequence
  synthesized
acccaacaauggccagagau

SEQ ID NO: 2313 - RNA, 20 nt, Artificial Sequence
  synthesized
acccaacaauggccagcgau

SEQ ID NO: 2314 - RNA, 20 nt, Artificial Sequence
  synthesized
agagauucccugagaauggg

SEQ ID NO: 2315 - RNA, 20 nt, Artificial Sequence
  synthesized
agcgauucccugagaauggg

SEQ ID NO: 2316 - RNA, 20 nt, Artificial Sequence
  synthesized
aucgcuggccauuguugggu

SEQ ID NO: 2317 - RNA, 20 nt, Artificial Sequence
  synthesized
aucucuggccauuguugggu

SEQ ID NO: 2318 - RNA, 20 nt, Artificial Sequence
  synthesized
auggccagagauucccugag

SEQ ID NO: 2319 - RNA, 20 nt, Artificial Sequence
  synthesized
auggccagcgauucccugag

SEQ ID NO: 2320 - RNA, 20 nt, Artificial Sequence
  synthesized
auucucagggaaucgcuggc

SEQ ID NO: 2321 - RNA, 20 nt, Artificial Sequence
  synthesized
auucucagggaaucucuggc

SEQ ID NO: 2322 - RNA, 20 nt, Artificial Sequence
  synthesized
caacaauggccagagauucc

SEQ ID NO: 2323 - RNA, 20 nt, Artificial Sequence
  synthesized
caacaauggccagcgauucc

SEQ ID NO: 2324 - RNA, 20 nt, Artificial Sequence
  synthesized
cacccaacaauggccagaga

SEQ ID NO: 2325 - RNA, 20 nt, Artificial Sequence
  synthesized
cacccaacaauggccagcga

SEQ ID NO: 2326 - RNA, 20 nt, Artificial Sequence
  synthesized
cagagauucccugagaaugg

SEQ ID NO: 2327 - RNA, 20 nt, Artificial Sequence
  synthesized
cagcgauucccugagaaugg

SEQ ID NO: 2328 - RNA, 20 nt, Artificial Sequence
  synthesized
cagggaaucgcuggccauug

SEQ ID NO: 2329 - RNA, 20 nt, Artificial Sequence
  synthesized
cagggaaucucuggccauug

SEQ ID NO: 2330 - RNA, 20 nt, Artificial Sequence
  synthesized
cauucucagggaaucgcugg

SEQ ID NO: 2331 - RNA, 20 nt, Artificial Sequence
  synthesized
cauucucagggaaucucugg

SEQ ID NO: 2332 - RNA, 20 nt, Artificial Sequence
  synthesized
ccaacaauggccagagauuc

SEQ ID NO: 2333 - RNA, 20 nt, Artificial Sequence
  synthesized
ccaacaauggccagcgauuc

SEQ ID NO: 2334 - RNA, 20 nt, Artificial Sequence
  synthesized
ccauucucagggaaucgcug

SEQ ID NO: 2335 - RNA, 20 nt, Artificial Sequence
  synthesized
ccauucucagggaaucucug

SEQ ID NO: 2336 - RNA, 20 nt, Artificial Sequence
  synthesized
cccaacaauggccagagauu

SEQ ID NO: 2337 - RNA, 20 nt, Artificial Sequence
  synthesized
cccaacaauggccagcgauu

SEQ ID NO: 2338 - RNA, 20 nt, Artificial Sequence
  synthesized
cccauucucagggaaucgcu

SEQ ID NO: 2339 - RNA, 20 nt, Artificial Sequence
  synthesized
cccauucucagggaaucucu

SEQ ID NO: 2340 - RNA, 20 nt, Artificial Sequence
  synthesized
cgcuggccauuguugggugu

SEQ ID NO: 2341 - RNA, 20 nt, Artificial Sequence
  synthesized
cucagggaaucgcuggccau

SEQ ID NO: 2342 - RNA, 20 nt, Artificial Sequence
  synthesized
cucagggaaucucuggccau

SEQ ID NO: 2343 - RNA, 20 nt, Artificial Sequence
  synthesized
cucuggccauuguugggugu

SEQ ID NO: 2344 - RNA, 20 nt, Artificial Sequence
  synthesized
gaaucgcuggccauuguugg

SEQ ID NO: 2345 - RNA, 20 nt, Artificial Sequence
  synthesized
gaaucucuggccauuguugg

SEQ ID NO: 2346 - RNA, 20 nt, Artificial Sequence
  synthesized
gagauucccugagaauggga

SEQ ID NO: 2347 - RNA, 20 nt, Artificial Sequence
  synthesized
gcgauucccugagaauggga

SEQ ID NO: 2348 - RNA, 20 nt, Artificial Sequence
  synthesized
gcuggccauuguuggguguu

SEQ ID NO: 2349 - RNA, 20 nt, Artificial Sequence
  synthesized
gucccauucucagggaaucg

SEQ ID NO: 2350 - RNA, 20 nt, Artificial Sequence
  synthesized
gucccauucucagggaaucu

SEQ ID NO: 2351 - RNA, 20 nt, Artificial Sequence
  synthesized
ucagggaaucgcuggccauu

SEQ ID NO: 2352 - RNA, 20 nt, Artificial Sequence
  synthesized
ucagggaaucucuggccauu

SEQ ID NO: 2353 - RNA, 20 nt, Artificial Sequence
  synthesized
ucgcuggccauuguugggug

SEQ ID NO: 2354 - RNA, 20 nt, Artificial Sequence
  synthesized
ucucagggaaucgcuggcca

SEQ ID NO: 2355 - RNA, 20 nt, Artificial Sequence
  synthesized
ucucagggaaucucuggcca

SEQ ID NO: 2356 - RNA, 20 nt, Artificial Sequence
  synthesized
ucucuggccauuguugggug

SEQ ID NO: 2357 - RNA, 20 nt, Artificial Sequence
  synthesized
ucuggccauuguuggguguu

SEQ ID NO: 2358 - RNA, 20 nt, Artificial Sequence
  synthesized
uggccagagauucccugaga

SEQ ID NO: 2359 - RNA, 20 nt, Artificial Sequence
  synthesized
uggccagcgauucccugaga

SEQ ID NO: 2360 - RNA, 20 nt, Artificial Sequence
  synthesized
uucucagggaaucgcuggcc

SEQ ID NO: 2361 - RNA, 20 nt, Artificial Sequence
  synthesized
uucucagggaaucucuggcc

SEQ ID NO: 2362 - RNA, 20 nt, Artificial Sequence
  synthesized
aaggucagucccaguuuaca

SEQ ID NO: 2363 - RNA, 20 nt, Artificial Sequence
  synthesized
acccugcagagaacaaccac

SEQ ID NO: 2364 - RNA, 20 nt, Artificial Sequence
  synthesized
accuugcagagaacaaccac

SEQ ID NO: 2365 - RNA, 20 nt, Artificial Sequence
  synthesized
acugacccugcagagaacaa

SEQ ID NO: 2366 - RNA, 20 nt, Artificial Sequence
  synthesized
acugaccuugcagagaacaa

SEQ ID NO: 2367 - RNA, 20 nt, Artificial Sequence
  synthesized
acugggacugacccugcaga

SEQ ID NO: 2368 - RNA, 20 nt, Artificial Sequence
  synthesized
acugggacugaccuugcaga

SEQ ID NO: 2369 - RNA, 20 nt, Artificial Sequence
  synthesized
agggucagucccaguuuaca

SEQ ID NO: 2370 - RNA, 20 nt, Artificial Sequence
  synthesized
aggucagucccaguuuacaa

SEQ ID NO: 2371 - RNA, 20 nt, Artificial Sequence
  synthesized
caaggucagucccaguuuac

SEQ ID NO: 2372 - RNA, 20 nt, Artificial Sequence
  synthesized
cagggucagucccaguuuac

SEQ ID NO: 2373 - RNA, 20 nt, Artificial Sequence
  synthesized
cccugcagagaacaaccacc

SEQ ID NO: 2374 - RNA, 20 nt, Artificial Sequence
  synthesized
ccugcagagaacaaccaccc

SEQ ID NO: 2375 - RNA, 20 nt, Artificial Sequence
  synthesized
ccuugcagagaacaaccacc

SEQ ID NO: 2376 - RNA, 20 nt, Artificial Sequence
  synthesized
cgggugguuguucucugcaa

SEQ ID NO: 2377 - RNA, 20 nt, Artificial Sequence
  synthesized
cgggugguuguucucugcag

SEQ ID NO: 2378 - RNA, 20 nt, Artificial Sequence
  synthesized
cucugcaaggucagucccag

SEQ ID NO: 2379 - RNA, 20 nt, Artificial Sequence
  synthesized
cucugcagggucagucccag

SEQ ID NO: 2380 - RNA, 20 nt, Artificial Sequence
  synthesized
cugacccugcagagaacaac

SEQ ID NO: 2381 - RNA, 20 nt, Artificial Sequence
  synthesized
cugaccuugcagagaacaac

SEQ ID NO: 2382 - RNA, 20 nt, Artificial Sequence
  synthesized
cugcaaggucagucccaguu

SEQ ID NO: 2383 - RNA, 20 nt, Artificial Sequence
  synthesized
cugcagagaacaaccacccg

SEQ ID NO: 2384 - RNA, 20 nt, Artificial Sequence
  synthesized
cugcagggucagucccaguu

SEQ ID NO: 2385 - RNA, 20 nt, Artificial Sequence
  synthesized
cuugcagagaacaaccaccc

SEQ ID NO: 2386 - RNA, 20 nt, Artificial Sequence
  synthesized
gacccugcagagaacaacca

SEQ ID NO: 2387 - RNA, 20 nt, Artificial Sequence
  synthesized
gaccuugcagagaacaacca

SEQ ID NO: 2388 - RNA, 20 nt, Artificial Sequence
  synthesized
gacugacccugcagagaaca

SEQ ID NO: 2389 - RNA, 20 nt, Artificial Sequence
  synthesized
gacugaccuugcagagaaca

SEQ ID NO: 2390 - RNA, 20 nt, Artificial Sequence
  synthesized
gcaaggucagucccaguuua

SEQ ID NO: 2391 - RNA, 20 nt, Artificial Sequence
  synthesized
gcagggucagucccaguuua

SEQ ID NO: 2392 - RNA, 20 nt, Artificial Sequence
  synthesized
gggacugacccugcagagaa

SEQ ID NO: 2393 - RNA, 20 nt, Artificial Sequence
  synthesized
gggacugaccuugcagagaa

SEQ ID NO: 2394 - RNA, 20 nt, Artificial Sequence
  synthesized
gggucagucccaguuuacaa

SEQ ID NO: 2395 - RNA, 20 nt, Artificial Sequence
  synthesized
ggugguuguucucugcaagg

SEQ ID NO: 2396 - RNA, 20 nt, Artificial Sequence
  synthesized
ggugguuguucucugcaggg

SEQ ID NO: 2397 - RNA, 20 nt, Artificial Sequence
  synthesized
gguuguucucugcaagguca

SEQ ID NO: 2398 - RNA, 20 nt, Artificial Sequence
  synthesized
gguuguucucugcaggguca

SEQ ID NO: 2399 - RNA, 20 nt, Artificial Sequence
  synthesized
guaaacugggacugacccug

SEQ ID NO: 2400 - RNA, 20 nt, Artificial Sequence
  synthesized
guaaacugggacugaccuug

SEQ ID NO: 2401 - RNA, 20 nt, Artificial Sequence
  synthesized
gugguuguucucugcaaggu

SEQ ID NO: 2402 - RNA, 20 nt, Artificial Sequence
  synthesized
gugguuguucucugcagggu

SEQ ID NO: 2403 - RNA, 20 nt, Artificial Sequence
  synthesized
guucucugcaaggucagucc

SEQ ID NO: 2404 - RNA, 20 nt, Artificial Sequence
  synthesized
guucucugcagggucagucc

SEQ ID NO: 2405 - RNA, 20 nt, Artificial Sequence
  synthesized
guuguucucugcaaggucag

SEQ ID NO: 2406 - RNA, 20 nt, Artificial Sequence
  synthesized
guuguucucugcagggucag

SEQ ID NO: 2407 - RNA, 20 nt, Artificial Sequence
  synthesized
ucucugcaaggucaguccca

SEQ ID NO: 2408 - RNA, 20 nt, Artificial Sequence
  synthesized
ucucugcagggucaguccca

SEQ ID NO: 2409 - RNA, 20 nt, Artificial Sequence
  synthesized
ucugcaaggucagucccagu

SEQ ID NO: 2410 - RNA, 20 nt, Artificial Sequence
  synthesized
ucugcagggucagucccagu

SEQ ID NO: 2411 - RNA, 20 nt, Artificial Sequence
  synthesized
ugggacugacccugcagaga

SEQ ID NO: 2412 - RNA, 20 nt, Artificial Sequence
  synthesized
ugggacugaccuugcagaga

SEQ ID NO: 2413 - RNA, 20 nt, Artificial Sequence
  synthesized
ugguuguucucugcaagguc

SEQ ID NO: 2414 - RNA, 20 nt, Artificial Sequence
  synthesized
ugguuguucucugcaggguc

SEQ ID NO: 2415 - RNA, 20 nt, Artificial Sequence
  synthesized
uguaaacugggacugacccu

SEQ ID NO: 2416 - RNA, 20 nt, Artificial Sequence
  synthesized
uguaaacugggacugaccuu

SEQ ID NO: 2417 - RNA, 20 nt, Artificial Sequence
  synthesized
uguucucugcaaggucaguc

SEQ ID NO: 2418 - RNA, 20 nt, Artificial Sequence
  synthesized
uguucucugcagggucaguc

SEQ ID NO: 2419 - RNA, 20 nt, Artificial Sequence
  synthesized
uucucugcaaggucaguccc

SEQ ID NO: 2420 - RNA, 20 nt, Artificial Sequence
  synthesized
uucucugcagggucaguccc

SEQ ID NO: 2421 - RNA, 20 nt, Artificial Sequence
  synthesized
uugcagagaacaaccacccg

SEQ ID NO: 2422 - RNA, 20 nt, Artificial Sequence
  synthesized
uuguaaacugggacugaccc

SEQ ID NO: 2423 - RNA, 20 nt, Artificial Sequence
  synthesized
uuguaaacugggacugaccu

SEQ ID NO: 2424 - RNA, 20 nt, Artificial Sequence
  synthesized
uuguucucugcaaggucagu

SEQ ID NO: 2425 - RNA, 20 nt, Artificial Sequence
  synthesized
uuguucucugcagggucagu

SEQ ID NO: 2426 - RNA, 20 nt, Artificial Sequence
  synthesized
aaaagcaagaugcugagguu

SEQ ID NO: 2427 - RNA, 20 nt, Artificial Sequence
  synthesized
aaagcaagaugcugagguuc

SEQ ID NO: 2428 - RNA, 20 nt, Artificial Sequence
  synthesized
aaccucagcaucuugcuuuu

SEQ ID NO: 2429 - RNA, 20 nt, Artificial Sequence
  synthesized
aagaugcugagguucugcua

SEQ ID NO: 2430 - RNA, 20 nt, Artificial Sequence
  synthesized
aagcaagaugcugagguucu

SEQ ID NO: 2431 - RNA, 20 nt, Artificial Sequence
  synthesized
acacagcuuagcagaaccuc

SEQ ID NO: 2432 - RNA, 20 nt, Artificial Sequence
  synthesized
acacagcuuagcaguaccuc

SEQ ID NO: 2433 - RNA, 20 nt, Artificial Sequence
  synthesized
acagcuuagcagaaccucag

SEQ ID NO: 2434 - RNA, 20 nt, Artificial Sequence
  synthesized
agaaccucagcaucuugcuu

SEQ ID NO: 2435 - RNA, 20 nt, Artificial Sequence
  synthesized
agaugcugagguucugcuaa

SEQ ID NO: 2436 - RNA, 20 nt, Artificial Sequence
  synthesized
agcaagaugcugagguucug

SEQ ID NO: 2437 - RNA, 20 nt, Artificial Sequence
  synthesized
agcagaaccucagcaucuug

SEQ ID NO: 2438 - RNA, 20 nt, Artificial Sequence
  synthesized
agcuuagcagaaccucagca

SEQ ID NO: 2439 - RNA, 20 nt, Artificial Sequence
  synthesized
aucccacacagcuuagcaga

SEQ ID NO: 2440 - RNA, 20 nt, Artificial Sequence
  synthesized
aucccacacagcuuagcagu

SEQ ID NO: 2441 - RNA, 20 nt, Artificial Sequence
  synthesized
caagaugcugagguucugcu

SEQ ID NO: 2442 - RNA, 20 nt, Artificial Sequence
  synthesized
cacagcuuagcagaaccuca

SEQ ID NO: 2443 - RNA, 20 nt, Artificial Sequence
  synthesized
cagaaccucagcaucuugcu

SEQ ID NO: 2444 - RNA, 20 nt, Artificial Sequence
  synthesized
cagcuuagcagaaccucagc

SEQ ID NO: 2445 - RNA, 20 nt, Artificial Sequence
  synthesized
ccacacagcuuagcagaacc

SEQ ID NO: 2446 - RNA, 20 nt, Artificial Sequence
  synthesized
ccacacagcuuagcaguacc

SEQ ID NO: 2447 - RNA, 20 nt, Artificial Sequence
  synthesized
cugagguacugcuaagcugu

SEQ ID NO: 2448 - RNA, 20 nt, Artificial Sequence
  synthesized
cugagguucugcuaagcugu

SEQ ID NO: 2449 - RNA, 20 nt, Artificial Sequence
  synthesized
cuuagcagaaccucagcauc

SEQ ID NO: 2450 - RNA, 20 nt, Artificial Sequence
  synthesized
gaugcugagguucugcuaag

SEQ ID NO: 2451 - RNA, 20 nt, Artificial Sequence
  synthesized
gcaagaugcugagguucugc

SEQ ID NO: 2452 - RNA, 20 nt, Artificial Sequence
  synthesized
gcagaaccucagcaucuugc

SEQ ID NO: 2453 - RNA, 20 nt, Artificial Sequence
  synthesized
gcuuagcagaaccucagcau

SEQ ID NO: 2454 - RNA, 20 nt, Artificial Sequence
  synthesized
gguacugcuaagcugugugg

SEQ ID NO: 2455 - RNA, 20 nt, Artificial Sequence
  synthesized
gguucugcuaagcugugugg

SEQ ID NO: 2456 - RNA, 20 nt, Artificial Sequence
  synthesized
guacugcuaagcuguguggg

SEQ ID NO: 2457 - RNA, 20 nt, Artificial Sequence
  synthesized
guucugcuaagcuguguggg

SEQ ID NO: 2458 - RNA, 20 nt, Artificial Sequence
  synthesized
uagcagaaccucagcaucuu

SEQ ID NO: 2459 - RNA, 20 nt, Artificial Sequence
  synthesized
ucccacacagcuuagcagaa

SEQ ID NO: 2460 - RNA, 20 nt, Artificial Sequence
  synthesized
ucccacacagcuuagcagua

SEQ ID NO: 2461 - RNA, 20 nt, Artificial Sequence
  synthesized
ugcugagguacugcuaagcu

SEQ ID NO: 2462 - RNA, 20 nt, Artificial Sequence
  synthesized
ugcugagguucugcuaagcu

SEQ ID NO: 2463 - RNA, 20 nt, Artificial Sequence
  synthesized
uuagcagaaccucagcaucu

SEQ ID NO: 2464 - RNA, 20 nt, Artificial Sequence
  synthesized
agaagaagaaacagacucua

SEQ ID NO: 2465 - RNA, 20 nt, Artificial Sequence
  synthesized
agagucuguuucuucuuccg

SEQ ID NO: 2466 - RNA, 20 nt, Artificial Sequence
  synthesized
agagucuguuucuucuucug

SEQ ID NO: 2467 - RNA, 20 nt, Artificial Sequence
  synthesized
agggcagaagaagaaacaga

SEQ ID NO: 2468 - RNA, 20 nt, Artificial Sequence
  synthesized
agggcggaagaagaaacaga

SEQ ID NO: 2469 - RNA, 20 nt, Artificial Sequence
  synthesized
agggguguagggcagaagaa

SEQ ID NO: 2470 - RNA, 20 nt, Artificial Sequence
  synthesized
agggguguagggcggaagaa

SEQ ID NO: 2471 - RNA, 20 nt, Artificial Sequence
  synthesized
aggguagggguguagggcag

SEQ ID NO: 2472 - RNA, 20 nt, Artificial Sequence
  synthesized
aggguagggguguagggcgg

SEQ ID NO: 2473 - RNA, 20 nt, Artificial Sequence
  synthesized
cagaagaagaaacagacucu

SEQ ID NO: 2474 - RNA, 20 nt, Artificial Sequence
  synthesized
caggguagggguguagggca

SEQ ID NO: 2475 - RNA, 20 nt, Artificial Sequence
  synthesized
caggguagggguguagggcg

SEQ ID NO: 2476 - RNA, 20 nt, Artificial Sequence
  synthesized
ccgcccuacaccccuacccu

SEQ ID NO: 2477 - RNA, 20 nt, Artificial Sequence
  synthesized
cggaagaagaaacagacucu

SEQ ID NO: 2478 - RNA, 20 nt, Artificial Sequence
  synthesized
cugcccuacaccccuacccu

SEQ ID NO: 2479 - RNA, 20 nt, Artificial Sequence
  synthesized
cuguuucuucuuccgcccua

SEQ ID NO: 2480 - RNA, 20 nt, Artificial Sequence
  synthesized
cuguuucuucuucugcccua

SEQ ID NO: 2481 - RNA, 20 nt, Artificial Sequence
  synthesized
cuuccgcccuacaccccuac

SEQ ID NO: 2482 - RNA, 20 nt, Artificial Sequence
  synthesized
cuucugcccuacaccccuac

SEQ ID NO: 2483 - RNA, 20 nt, Artificial Sequence
  synthesized
cuucuuccgcccuacacccc

SEQ ID NO: 2484 - RNA, 20 nt, Artificial Sequence
  synthesized
cuucuucugcccuacacccc

SEQ ID NO: 2485 - RNA, 20 nt, Artificial Sequence
  synthesized
gagucuguuucuucuuccgc

SEQ ID NO: 2486 - RNA, 20 nt, Artificial Sequence
  synthesized
gagucuguuucuucuucugc

SEQ ID NO: 2487 - RNA, 20 nt, Artificial Sequence
  synthesized
gcagaagaagaaacagacuc

SEQ ID NO: 2488 - RNA, 20 nt, Artificial Sequence
  synthesized
gcggaagaagaaacagacuc

SEQ ID NO: 2489 - RNA, 20 nt, Artificial Sequence
  synthesized
ggaagaagaaacagacucua

SEQ ID NO: 2490 - RNA, 20 nt, Artificial Sequence
  synthesized
ggcagaagaagaaacagacu

SEQ ID NO: 2491 - RNA, 20 nt, Artificial Sequence
  synthesized
ggcggaagaagaaacagacu

SEQ ID NO: 2492 - RNA, 20 nt, Artificial Sequence
  synthesized
gggcagaagaagaaacagac

SEQ ID NO: 2493 - RNA, 20 nt, Artificial Sequence
  synthesized
gggcggaagaagaaacagac

SEQ ID NO: 2494 - RNA, 20 nt, Artificial Sequence
  synthesized
gggguguagggcagaagaag

SEQ ID NO: 2495 - RNA, 20 nt, Artificial Sequence
  synthesized
gggguguagggcggaagaag

SEQ ID NO: 2496 - RNA, 20 nt, Artificial Sequence
  synthesized
ggguguagggcagaagaaga

SEQ ID NO: 2497 - RNA, 20 nt, Artificial Sequence
  synthesized
ggguguagggcggaagaaga

SEQ ID NO: 2498 - RNA, 20 nt, Artificial Sequence
  synthesized
gguagggguguagggcagaa

SEQ ID NO: 2499 - RNA, 20 nt, Artificial Sequence
  synthesized
gguagggguguagggcggaa

SEQ ID NO: 2500 - RNA, 20 nt, Artificial Sequence
  synthesized
gguguagggcagaagaagaa

SEQ ID NO: 2501 - RNA, 20 nt, Artificial Sequence
  synthesized
gguguagggcggaagaagaa

SEQ ID NO: 2502 - RNA, 20 nt, Artificial Sequence
  synthesized
guagggcagaagaagaaaca

SEQ ID NO: 2503 - RNA, 20 nt, Artificial Sequence
  synthesized
guagggcggaagaagaaaca

SEQ ID NO: 2504 - RNA, 20 nt, Artificial Sequence
  synthesized
guagggguguagggcagaag

SEQ ID NO: 2505 - RNA, 20 nt, Artificial Sequence
  synthesized
guagggguguagggcggaag

SEQ ID NO: 2506 - RNA, 20 nt, Artificial Sequence
  synthesized
gucuguuucuucuuccgccc

SEQ ID NO: 2507 - RNA, 20 nt, Artificial Sequence
  synthesized
gucuguuucuucuucugccc

SEQ ID NO: 2508 - RNA, 20 nt, Artificial Sequence
  synthesized
guguagggcagaagaagaaa

SEQ ID NO: 2509 - RNA, 20 nt, Artificial Sequence
  synthesized
guguagggcggaagaagaaa

SEQ ID NO: 2510 - RNA, 20 nt, Artificial Sequence
  synthesized
guuucuucuuccgcccuaca

SEQ ID NO: 2511 - RNA, 20 nt, Artificial Sequence
  synthesized
guuucuucuucugcccuaca

SEQ ID NO: 2512 - RNA, 20 nt, Artificial Sequence
  synthesized
uagagucuguuucuucuucc

SEQ ID NO: 2513 - RNA, 20 nt, Artificial Sequence
  synthesized
uagagucuguuucuucuucu

SEQ ID NO: 2514 - RNA, 20 nt, Artificial Sequence
  synthesized
uagggcagaagaagaaacag

SEQ ID NO: 2515 - RNA, 20 nt, Artificial Sequence
  synthesized
uagggcggaagaagaaacag

SEQ ID NO: 2516 - RNA, 20 nt, Artificial Sequence
  synthesized
ucuguuucuucuuccgcccu

SEQ ID NO: 2517 - RNA, 20 nt, Artificial Sequence
  synthesized
ucuguuucuucuucugcccu

SEQ ID NO: 2518 - RNA, 20 nt, Artificial Sequence
  synthesized
ucuuccgcccuacaccccua

SEQ ID NO: 2519 - RNA, 20 nt, Artificial Sequence
  synthesized
ucuucugcccuacaccccua

SEQ ID NO: 2520 - RNA, 20 nt, Artificial Sequence
  synthesized
ucuucuuccgcccuacaccc

SEQ ID NO: 2521 - RNA, 20 nt, Artificial Sequence
  synthesized
ucuucuucugcccuacaccc

SEQ ID NO: 2522 - RNA, 20 nt, Artificial Sequence
  synthesized
uguuucuucuuccgcccuac

SEQ ID NO: 2523 - RNA, 20 nt, Artificial Sequence
  synthesized
uguuucuucuucugcccuac

SEQ ID NO: 2524 - RNA, 20 nt, Artificial Sequence
  synthesized
uuccgcccuacaccccuacc

SEQ ID NO: 2525 - RNA, 20 nt, Artificial Sequence
  synthesized
uucugcccuacaccccuacc

SEQ ID NO: 2526 - RNA, 20 nt, Artificial Sequence
  synthesized
uucuuccgcccuacaccccu

SEQ ID NO: 2527 - RNA, 20 nt, Artificial Sequence
  synthesized
uucuucugcccuacaccccu

SEQ ID NO: 2528 - RNA, 20 nt, Artificial Sequence
  synthesized
uucuucuuccgcccuacacc

SEQ ID NO: 2529 - RNA, 20 nt, Artificial Sequence
  synthesized
uucuucuucugcccuacacc

SEQ ID NO: 2530 - RNA, 20 nt, Artificial Sequence
  synthesized
uuucuucuuccgcccuacac

SEQ ID NO: 2531 - RNA, 20 nt, Artificial Sequence
  synthesized
uuucuucuucugcccuacac

SEQ ID NO: 2532 - RNA, 20 nt, Artificial Sequence
  synthesized
aaaagugucccagcuuaggg

SEQ ID NO: 2533 - RNA, 20 nt, Artificial Sequence
  synthesized
aaaagugucucagcuuaggg

SEQ ID NO: 2534 - RNA, 20 nt, Artificial Sequence
  synthesized
aaagugucccagcuuaggga

SEQ ID NO: 2535 - RNA, 20 nt, Artificial Sequence
  synthesized
aaagugucucagcuuaggga

SEQ ID NO: 2536 - RNA, 20 nt, Artificial Sequence
  synthesized
aagcugagacacuuuuccag

SEQ ID NO: 2537 - RNA, 20 nt, Artificial Sequence
  synthesized
aagcugggacacuuuuccag

SEQ ID NO: 2538 - RNA, 20 nt, Artificial Sequence
  synthesized
aagugucccagcuuagggau

SEQ ID NO: 2539 - RNA, 20 nt, Artificial Sequence
  synthesized
aagugucucagcuuagggau

SEQ ID NO: 2540 - RNA, 20 nt, Artificial Sequence
  synthesized
acacuuaucccuaagcugag

SEQ ID NO: 2541 - RNA, 20 nt, Artificial Sequence
  synthesized
acacuuaucccuaagcuggg

SEQ ID NO: 2542 - RNA, 20 nt, Artificial Sequence
  synthesized
acuuaucccuaagcugagac

SEQ ID NO: 2543 - RNA, 20 nt, Artificial Sequence
  synthesized
acuuaucccuaagcugggac

SEQ ID NO: 2544 - RNA, 20 nt, Artificial Sequence
  synthesized
agcugagacacuuuuccaga

SEQ ID NO: 2545 - RNA, 20 nt, Artificial Sequence
  synthesized
agcugggacacuuuuccaga

SEQ ID NO: 2546 - RNA, 20 nt, Artificial Sequence
  synthesized
aucccuaagcugagacacuu

SEQ ID NO: 2547 - RNA, 20 nt, Artificial Sequence
  synthesized
aucccuaagcugggacacuu

SEQ ID NO: 2548 - RNA, 20 nt, Artificial Sequence
  synthesized
cacuuaucccuaagcugaga

SEQ ID NO: 2549 - RNA, 20 nt, Artificial Sequence
  synthesized
cacuuaucccuaagcuggga

SEQ ID NO: 2550 - RNA, 20 nt, Artificial Sequence
  synthesized
cccagcuuagggauaagugu

SEQ ID NO: 2551 - RNA, 20 nt, Artificial Sequence
  synthesized
cccuaagcugagacacuuuu

SEQ ID NO: 2552 - RNA, 20 nt, Artificial Sequence
  synthesized
cccuaagcugggacacuuuu

SEQ ID NO: 2553 - RNA, 20 nt, Artificial Sequence
  synthesized
ccuaagcugagacacuuuuc

SEQ ID NO: 2554 - RNA, 20 nt, Artificial Sequence
  synthesized
ccuaagcugggacacuuuuc

SEQ ID NO: 2555 - RNA, 20 nt, Artificial Sequence
  synthesized
cucagcuuagggauaagugu

SEQ ID NO: 2556 - RNA, 20 nt, Artificial Sequence
  synthesized
cugagacacuuuuccagaaa

SEQ ID NO: 2557 - RNA, 20 nt, Artificial Sequence
  synthesized
cugggacacuuuuccagaaa

SEQ ID NO: 2558 - RNA, 20 nt, Artificial Sequence
  synthesized
cuuaucccuaagcugagaca

SEQ ID NO: 2559 - RNA, 20 nt, Artificial Sequence
  synthesized
cuuaucccuaagcugggaca

SEQ ID NO: 2560 - RNA, 20 nt, Artificial Sequence
  synthesized
cuuucuggaaaaguguccca

SEQ ID NO: 2561 - RNA, 20 nt, Artificial Sequence
  synthesized
cuuucuggaaaagugucuca

SEQ ID NO: 2562 - RNA, 20 nt, Artificial Sequence
  synthesized
gaaaagugucccagcuuagg

SEQ ID NO: 2563 - RNA, 20 nt, Artificial Sequence
  synthesized
gaaaagugucucagcuuagg

SEQ ID NO: 2564 - RNA, 20 nt, Artificial Sequence
  synthesized
gacacuuaucccuaagcuga

SEQ ID NO: 2565 - RNA, 20 nt, Artificial Sequence
  synthesized
gacacuuaucccuaagcugg

SEQ ID NO: 2566 - RNA, 20 nt, Artificial Sequence
  synthesized
gcugagacacuuuuccagaa

SEQ ID NO: 2567 - RNA, 20 nt, Artificial Sequence
  synthesized
gcugggacacuuuuccagaa

SEQ ID NO: 2568 - RNA, 20 nt, Artificial Sequence
  synthesized
gcuuucuggaaaaguguccc

SEQ ID NO: 2569 - RNA, 20 nt, Artificial Sequence
  synthesized
gcuuucuggaaaagugucuc

SEQ ID NO: 2570 - RNA, 20 nt, Artificial Sequence
  synthesized
gucccagcuuagggauaagu

SEQ ID NO: 2571 - RNA, 20 nt, Artificial Sequence
  synthesized
gucucagcuuagggauaagu

SEQ ID NO: 2572 - RNA, 20 nt, Artificial Sequence
  synthesized
gugucccagcuuagggauaa

SEQ ID NO: 2573 - RNA, 20 nt, Artificial Sequence
  synthesized
gugucucagcuuagggauaa

SEQ ID NO: 2574 - RNA, 20 nt, Artificial Sequence
  synthesized
uaucccuaagcugagacacu

SEQ ID NO: 2575 - RNA, 20 nt, Artificial Sequence
  synthesized
uaucccuaagcugggacacu

SEQ ID NO: 2576 - RNA, 20 nt, Artificial Sequence
  synthesized
ucccuaagcugagacacuuu

SEQ ID NO: 2577 - RNA, 20 nt, Artificial Sequence
  synthesized
ucccuaagcugggacacuuu

SEQ ID NO: 2578 - RNA, 20 nt, Artificial Sequence
  synthesized
ucuggaaaagugucccagcu

SEQ ID NO: 2579 - RNA, 20 nt, Artificial Sequence
  synthesized
ucuggaaaagugucucagcu

SEQ ID NO: 2580 - RNA, 20 nt, Artificial Sequence
  synthesized
ugagacacuuuuccagaaag

SEQ ID NO: 2581 - RNA, 20 nt, Artificial Sequence
  synthesized
ugcuuucuggaaaagugucc

SEQ ID NO: 2582 - RNA, 20 nt, Artificial Sequence
  synthesized
ugcuuucuggaaaagugucu

SEQ ID NO: 2583 - RNA, 20 nt, Artificial Sequence
  synthesized
ugggacacuuuuccagaaag

SEQ ID NO: 2584 - RNA, 20 nt, Artificial Sequence
  synthesized
ugucccagcuuagggauaag

SEQ ID NO: 2585 - RNA, 20 nt, Artificial Sequence
  synthesized
ugucucagcuuagggauaag

SEQ ID NO: 2586 - RNA, 20 nt, Artificial Sequence
  synthesized
uuaucccuaagcugagacac

SEQ ID NO: 2587 - RNA, 20 nt, Artificial Sequence
  synthesized
uuaucccuaagcugggacac

SEQ ID NO: 2588 - RNA, 20 nt, Artificial Sequence
  synthesized
uucuggaaaagugucccagc

SEQ ID NO: 2589 - RNA, 20 nt, Artificial Sequence
  synthesized
uucuggaaaagugucucagc

SEQ ID NO: 2590 - RNA, 20 nt, Artificial Sequence
  synthesized
uuucuggaaaagugucccag

SEQ ID NO: 2591 - RNA, 20 nt, Artificial Sequence
  synthesized
uuucuggaaaagugucucag

SEQ ID NO: 2592 - RNA, 20 nt, Artificial Sequence
  synthesized
aaaaaaguuuugagacaagg

SEQ ID NO: 2593 - RNA, 20 nt, Artificial Sequence
  synthesized
aaaaaguuuugagacaaggu

SEQ ID NO: 2594 - RNA, 20 nt, Artificial Sequence
  synthesized
aaaaguuuugagacaagguc

SEQ ID NO: 2595 - RNA, 20 nt, Artificial Sequence
  synthesized
aaaauuuuugagacaagguc

SEQ ID NO: 2596 - RNA, 20 nt, Artificial Sequence
  synthesized
aaagcuugacgaagaaaaaa

SEQ ID NO: 2597 - RNA, 20 nt, Artificial Sequence
  synthesized
aaaguuuugagacaaggucu

SEQ ID NO: 2598 - RNA, 20 nt, Artificial Sequence
  synthesized
aaauuuuugagacaaggucu

SEQ ID NO: 2599 - RNA, 20 nt, Artificial Sequence
  synthesized
accuugucucaaaacuuuuu

SEQ ID NO: 2600 - RNA, 20 nt, Artificial Sequence
  synthesized
agaccuugucucaaaaauuu

SEQ ID NO: 2601 - RNA, 20 nt, Artificial Sequence
  synthesized
agaccuugucucaaaacuuu

SEQ ID NO: 2602 - RNA, 20 nt, Artificial Sequence
  synthesized
agagaccuugucucaaaaau

SEQ ID NO: 2603 - RNA, 20 nt, Artificial Sequence
  synthesized
agagaccuugucucaaaacu

SEQ ID NO: 2604 - RNA, 20 nt, Artificial Sequence
  synthesized
auuuuugagacaaggucucu

SEQ ID NO: 2605 - RNA, 20 nt, Artificial Sequence
  synthesized
cagagaccuugucucaaaaa

SEQ ID NO: 2606 - RNA, 20 nt, Artificial Sequence
  synthesized
cagagaccuugucucaaaac

SEQ ID NO: 2607 - RNA, 20 nt, Artificial Sequence
  synthesized
ccuugucucaaaacuuuuuu

SEQ ID NO: 2608 - RNA, 20 nt, Artificial Sequence
  synthesized
cuugacgaagaaaaaaaaag

SEQ ID NO: 2609 - RNA, 20 nt, Artificial Sequence
  synthesized
cuuuuuuuuucuucgucaag

SEQ ID NO: 2610 - RNA, 20 nt, Artificial Sequence
  synthesized
gaccuugucucaaaaauuuu

SEQ ID NO: 2611 - RNA, 20 nt, Artificial Sequence
  synthesized
gaccuugucucaaaacuuuu

SEQ ID NO: 2612 - RNA, 20 nt, Artificial Sequence
  synthesized
gagaccuugucucaaaaauu

SEQ ID NO: 2613 - RNA, 20 nt, Artificial Sequence
  synthesized
gagaccuugucucaaaacuu

SEQ ID NO: 2614 - RNA, 20 nt, Artificial Sequence
  synthesized
aaacccagagcguccagcgg

SEQ ID NO: 2615 - RNA, 20 nt, Artificial Sequence
  synthesized
aaauccagagcguccagcgg

SEQ ID NO: 2616 - RNA, 20 nt, Artificial Sequence
  synthesized
aacccagagcguccagcggc

SEQ ID NO: 2617 - RNA, 20 nt, Artificial Sequence
  synthesized
aauccagagcguccagcggc

SEQ ID NO: 2618 - RNA, 20 nt, Artificial Sequence
  synthesized
acccagagcguccagcggcu

SEQ ID NO: 2619 - RNA, 20 nt, Artificial Sequence
  synthesized
acgcucuggauuuccugagg

SEQ ID NO: 2620 - RNA, 20 nt, Artificial Sequence
  synthesized
acgcucuggguuuccugagg

SEQ ID NO: 2621 - RNA, 20 nt, Artificial Sequence
  synthesized
agccgcuggacgcucuggau

SEQ ID NO: 2622 - RNA, 20 nt, Artificial Sequence
  synthesized
agccgcuggacgcucugggu

SEQ ID NO: 2623 - RNA, 20 nt, Artificial Sequence
  synthesized
auccagagcguccagcggcu

SEQ ID NO: 2624 - RNA, 20 nt, Artificial Sequence
  synthesized
caggaaacccagagcgucca

SEQ ID NO: 2625 - RNA, 20 nt, Artificial Sequence
  synthesized
caggaaauccagagcgucca

SEQ ID NO: 2626 - RNA, 20 nt, Artificial Sequence
  synthesized
cccagagcguccagcggcuc

SEQ ID NO: 2627 - RNA, 20 nt, Artificial Sequence
  synthesized
ccgcuggacgcucuggauuu

SEQ ID NO: 2628 - RNA, 20 nt, Artificial Sequence
  synthesized
ccgcuggacgcucuggguuu

SEQ ID NO: 2629 - RNA, 20 nt, Artificial Sequence
  synthesized
ccucaggaaacccagagcgu

SEQ ID NO: 2630 - RNA, 20 nt, Artificial Sequence
  synthesized
ccucaggaaauccagagcgu

SEQ ID NO: 2631 - RNA, 20 nt, Artificial Sequence
  synthesized
cgcucuggauuuccugaggc

SEQ ID NO: 2632 - RNA, 20 nt, Artificial Sequence
  synthesized
cgcucuggguuuccugaggc

SEQ ID NO: 2633 - RNA, 20 nt, Artificial Sequence
  synthesized
cgcuggacgcucuggauuuc

SEQ ID NO: 2634 - RNA, 20 nt, Artificial Sequence
  synthesized
cgcuggacgcucuggguuuc

SEQ ID NO: 2635 - RNA, 20 nt, Artificial Sequence
  synthesized
cgggccucaggaaacccaga

SEQ ID NO: 2636 - RNA, 20 nt, Artificial Sequence
  synthesized
cgggccucaggaaauccaga

SEQ ID NO: 2637 - RNA, 20 nt, Artificial Sequence
  synthesized
cucaggaaacccagagcguc

SEQ ID NO: 2638 - RNA, 20 nt, Artificial Sequence
  synthesized
cucaggaaauccagagcguc

SEQ ID NO: 2639 - RNA, 20 nt, Artificial Sequence
  synthesized
cucuggauuuccugaggccc

SEQ ID NO: 2640 - RNA, 20 nt, Artificial Sequence
  synthesized
cucuggguuuccugaggccc

SEQ ID NO: 2641 - RNA, 20 nt, Artificial Sequence
  synthesized
cuggacgcucuggauuuccu

SEQ ID NO: 2642 - RNA, 20 nt, Artificial Sequence
  synthesized
cuggacgcucuggguuuccu

SEQ ID NO: 2643 - RNA, 20 nt, Artificial Sequence
  synthesized
cuggauuuccugaggcccgu

SEQ ID NO: 2644 - RNA, 20 nt, Artificial Sequence
  synthesized
cuggguuuccugaggcccgu

SEQ ID NO: 2645 - RNA, 20 nt, Artificial Sequence
  synthesized
gaaacccagagcguccagcg

SEQ ID NO: 2646 - RNA, 20 nt, Artificial Sequence
  synthesized
gaaauccagagcguccagcg

SEQ ID NO: 2647 - RNA, 20 nt, Artificial Sequence
  synthesized
gagccgcuggacgcucugga

SEQ ID NO: 2648 - RNA, 20 nt, Artificial Sequence
  synthesized
gagccgcuggacgcucuggg

SEQ ID NO: 2649 - RNA, 20 nt, Artificial Sequence
  synthesized
gauuuccugaggcccgucca

SEQ ID NO: 2650 - RNA, 20 nt, Artificial Sequence
  synthesized
gccgcuggacgcucuggauu

SEQ ID NO: 2651 - RNA, 20 nt, Artificial Sequence
  synthesized
gccgcuggacgcucuggguu

SEQ ID NO: 2652 - RNA, 20 nt, Artificial Sequence
  synthesized
gccucaggaaacccagagcg

SEQ ID NO: 2653 - RNA, 20 nt, Artificial Sequence
  synthesized
gccucaggaaauccagagcg

SEQ ID NO: 2654 - RNA, 20 nt, Artificial Sequence
  synthesized
gcucuggauuuccugaggcc

SEQ ID NO: 2655 - RNA, 20 nt, Artificial Sequence
  synthesized
gcucuggguuuccugaggcc

SEQ ID NO: 2656 - RNA, 20 nt, Artificial Sequence
  synthesized
ggaaacccagagcguccagc

SEQ ID NO: 2657 - RNA, 20 nt, Artificial Sequence
  synthesized
ggaaauccagagcguccagc

SEQ ID NO: 2658 - RNA, 20 nt, Artificial Sequence
  synthesized
ggacgcucuggauuuccuga

SEQ ID NO: 2659 - RNA, 20 nt, Artificial Sequence
  synthesized
ggacgcucuggguuuccuga

SEQ ID NO: 2660 - RNA, 20 nt, Artificial Sequence
  synthesized
ggauuuccugaggcccgucc

SEQ ID NO: 2661 - RNA, 20 nt, Artificial Sequence
  synthesized
ggccucaggaaacccagagc

SEQ ID NO: 2662 - RNA, 20 nt, Artificial Sequence
  synthesized
ggccucaggaaauccagagc

SEQ ID NO: 2663 - RNA, 20 nt, Artificial Sequence
  synthesized
gggccucaggaaacccagag

SEQ ID NO: 2664 - RNA, 20 nt, Artificial Sequence
  synthesized
gggccucaggaaauccagag

SEQ ID NO: 2665 - RNA, 20 nt, Artificial Sequence
  synthesized
ggguuuccugaggcccgucc

SEQ ID NO: 2666 - RNA, 20 nt, Artificial Sequence
  synthesized
gguuuccugaggcccgucca

SEQ ID NO: 2667 - RNA, 20 nt, Artificial Sequence
  synthesized
guggacgggccucaggaaac

SEQ ID NO: 2668 - RNA, 20 nt, Artificial Sequence
  synthesized
guggacgggccucaggaaau

SEQ ID NO: 2669 - RNA, 20 nt, Artificial Sequence
  synthesized
uccagagcguccagcggcuc

SEQ ID NO: 2670 - RNA, 20 nt, Artificial Sequence
  synthesized
ucuggauuuccugaggcccg

SEQ ID NO: 2671 - RNA, 20 nt, Artificial Sequence
  synthesized
ucuggguuuccugaggcccg

SEQ ID NO: 2672 - RNA, 20 nt, Artificial Sequence
  synthesized
uggacgggccucaggaaacc

SEQ ID NO: 2673 - RNA, 20 nt, Artificial Sequence
  synthesized
uggacgggccucaggaaauc

SEQ ID NO: 2674 - RNA, 20 nt, Artificial Sequence
  synthesized
uggauuuccugaggcccguc

SEQ ID NO: 2675 - RNA, 20 nt, Artificial Sequence
  synthesized
uggguuuccugaggcccguc

SEQ ID NO: 2676 - RNA, 20 nt, Artificial Sequence
  synthesized
aaucagaucagggggucagg

SEQ ID NO: 2677 - RNA, 20 nt, Artificial Sequence
  synthesized
acccccugaucugauccgug

SEQ ID NO: 2678 - RNA, 20 nt, Artificial Sequence
  synthesized
acccccugaucugauucgug

SEQ ID NO: 2679 - RNA, 20 nt, Artificial Sequence
  synthesized
auaagggacacgaaucagau

SEQ ID NO: 2680 - RNA, 20 nt, Artificial Sequence
  synthesized
auaagggacacggaucagau

SEQ ID NO: 2681 - RNA, 20 nt, Artificial Sequence
  synthesized
auccgugucccuuaugggcc

SEQ ID NO: 2682 - RNA, 20 nt, Artificial Sequence
  synthesized
auucgugucccuuaugggcc

SEQ ID NO: 2683 - RNA, 20 nt, Artificial Sequence
  synthesized
cacgaaucagaucagggggu

SEQ ID NO: 2684 - RNA, 20 nt, Artificial Sequence
  synthesized
cacggaucagaucagggggu

SEQ ID NO: 2685 - RNA, 20 nt, Artificial Sequence
  synthesized
cauaagggacacgaaucaga

SEQ ID NO: 2686 - RNA, 20 nt, Artificial Sequence
  synthesized
cauaagggacacggaucaga

SEQ ID NO: 2687 - RNA, 20 nt, Artificial Sequence
  synthesized
ccauaagggacacgaaucag

SEQ ID NO: 2688 - RNA, 20 nt, Artificial Sequence
  synthesized
ccauaagggacacggaucag

SEQ ID NO: 2689 - RNA, 20 nt, Artificial Sequence
  synthesized
cccauaagggacacgaauca

SEQ ID NO: 2690 - RNA, 20 nt, Artificial Sequence
  synthesized
cccauaagggacacggauca

SEQ ID NO: 2691 - RNA, 20 nt, Artificial Sequence
  synthesized
cccccugaucugauccgugu

SEQ ID NO: 2692 - RNA, 20 nt, Artificial Sequence
  synthesized
cccccugaucugauucgugu

SEQ ID NO: 2693 - RNA, 20 nt, Artificial Sequence
  synthesized
ccccugaucugauccguguc

SEQ ID NO: 2694 - RNA, 20 nt, Artificial Sequence
  synthesized
ccccugaucugauucguguc

SEQ ID NO: 2695 - RNA, 20 nt, Artificial Sequence
  synthesized
cccugaucugauccgugucc

SEQ ID NO: 2696 - RNA, 20 nt, Artificial Sequence
  synthesized
cccugaucugauucgugucc

SEQ ID NO: 2697 - RNA, 20 nt, Artificial Sequence
  synthesized
ccgugucccuuaugggccca

SEQ ID NO: 2698 - RNA, 20 nt, Artificial Sequence
  synthesized
ccugaucugauccguguccc

SEQ ID NO: 2699 - RNA, 20 nt, Artificial Sequence
  synthesized
ccugaucugauucguguccc

SEQ ID NO: 2700 - RNA, 20 nt, Artificial Sequence
  synthesized
cugacccccugaucugaucc

SEQ ID NO: 2701 - RNA, 20 nt, Artificial Sequence
  synthesized
cugacccccugaucugauuc

SEQ ID NO: 2702 - RNA, 20 nt, Artificial Sequence
  synthesized
cugauccgugucccuuaugg

SEQ ID NO: 2703 - RNA, 20 nt, Artificial Sequence
  synthesized
cugaucugauccgugucccu

SEQ ID NO: 2704 - RNA, 20 nt, Artificial Sequence
  synthesized
cugaucugauucgugucccu

SEQ ID NO: 2705 - RNA, 20 nt, Artificial Sequence
  synthesized
cugauucgugucccuuaugg

SEQ ID NO: 2706 - RNA, 20 nt, Artificial Sequence
  synthesized
gaaucagaucagggggucag

SEQ ID NO: 2707 - RNA, 20 nt, Artificial Sequence
  synthesized
gacacgaaucagaucagggg

SEQ ID NO: 2708 - RNA, 20 nt, Artificial Sequence
  synthesized
gacacggaucagaucagggg

SEQ ID NO: 2709 - RNA, 20 nt, Artificial Sequence
  synthesized
gacccccugaucugauccgu

SEQ ID NO: 2710 - RNA, 20 nt, Artificial Sequence
  synthesized
gacccccugaucugauucgu

SEQ ID NO: 2711 - RNA, 20 nt, Artificial Sequence
  synthesized
gaucagaucagggggucagg

SEQ ID NO: 2712 - RNA, 20 nt, Artificial Sequence
  synthesized
gauccgugucccuuaugggc

SEQ ID NO: 2713 - RNA, 20 nt, Artificial Sequence
  synthesized
gauucgugucccuuaugggc

SEQ ID NO: 2714 - RNA, 20 nt, Artificial Sequence
  synthesized
ggacacgaaucagaucaggg

SEQ ID NO: 2715 - RNA, 20 nt, Artificial Sequence
  synthesized
ggacacggaucagaucaggg

SEQ ID NO: 2716 - RNA, 20 nt, Artificial Sequence
  synthesized
ggaucagaucagggggucag

SEQ ID NO: 2717 - RNA, 20 nt, Artificial Sequence
  synthesized
ggcccauaagggacacgaau

SEQ ID NO: 2718 - RNA, 20 nt, Artificial Sequence
  synthesized
ggcccauaagggacacggau

SEQ ID NO: 2719 - RNA, 20 nt, Artificial Sequence
  synthesized
ucgugucccuuaugggccca

SEQ ID NO: 2720 - RNA, 20 nt, Artificial Sequence
  synthesized
ucugauccgugucccuuaug

SEQ ID NO: 2721 - RNA, 20 nt, Artificial Sequence
  synthesized
ucugauucgugucccuuaug

SEQ ID NO: 2722 - RNA, 20 nt, Artificial Sequence
  synthesized
ugacccccugaucugauccg

SEQ ID NO: 2723 - RNA, 20 nt, Artificial Sequence
  synthesized
ugacccccugaucugauucg

SEQ ID NO: 2724 - RNA, 20 nt, Artificial Sequence
  synthesized
ugauccgugucccuuauggg

SEQ ID NO: 2725 - RNA, 20 nt, Artificial Sequence
  synthesized
ugauucgugucccuuauggg

SEQ ID NO: 2726 - RNA, 20 nt, Artificial Sequence
  synthesized
ugggcccauaagggacacga

SEQ ID NO: 2727 - RNA, 20 nt, Artificial Sequence
  synthesized
ugggcccauaagggacacgg

SEQ ID NO: 2728 - RNA, 20 nt, Artificial Sequence
  synthesized
aacaaacaccauucauggug

SEQ ID NO: 2729 - RNA, 20 nt, Artificial Sequence
  synthesized
aauaaacaccauucauggug

SEQ ID NO: 2730 - RNA, 20 nt, Artificial Sequence
  synthesized
aaugguguuuauugacugaa

SEQ ID NO: 2731 - RNA, 20 nt, Artificial Sequence
  synthesized
aaugguguuuguugacugaa

SEQ ID NO: 2732 - RNA, 20 nt, Artificial Sequence
  synthesized
acaaacaccauucaugguga

SEQ ID NO: 2733 - RNA, 20 nt, Artificial Sequence
  synthesized
accaugaaugguguuuauug

SEQ ID NO: 2734 - RNA, 20 nt, Artificial Sequence
  synthesized
accaugaaugguguuuguug

SEQ ID NO: 2735 - RNA, 20 nt, Artificial Sequence
  synthesized
auaaacaccauucaugguga

SEQ ID NO: 2736 - RNA, 20 nt, Artificial Sequence
  synthesized
auauucagucaacaaacacc

SEQ ID NO: 2737 - RNA, 20 nt, Artificial Sequence
  synthesized
auauucagucaauaaacacc

SEQ ID NO: 2738 - RNA, 20 nt, Artificial Sequence
  synthesized
aucaccaugaaugguguuua

SEQ ID NO: 2739 - RNA, 20 nt, Artificial Sequence
  synthesized
aucaccaugaaugguguuug

SEQ ID NO: 2740 - RNA, 20 nt, Artificial Sequence
  synthesized
augaaugguguuuauugacu

SEQ ID NO: 2741 - RNA, 20 nt, Artificial Sequence
  synthesized
augaaugguguuuguugacu

SEQ ID NO: 2742 - RNA, 20 nt, Artificial Sequence
  synthesized
augguguuuauugacugaau

SEQ ID NO: 2743 - RNA, 20 nt, Artificial Sequence
  synthesized
augguguuuguugacugaau

SEQ ID NO: 2744 - RNA, 20 nt, Artificial Sequence
  synthesized
auucagucaacaaacaccau

SEQ ID NO: 2745 - RNA, 20 nt, Artificial Sequence
  synthesized
auucagucaauaaacaccau

SEQ ID NO: 2746 - RNA, 20 nt, Artificial Sequence
  synthesized
auugacugaauauaugaggg

SEQ ID NO: 2747 - RNA, 20 nt, Artificial Sequence
  synthesized
caaacaccauucauggugau

SEQ ID NO: 2748 - RNA, 20 nt, Artificial Sequence
  synthesized
caccaugaaugguguuuauu

SEQ ID NO: 2749 - RNA, 20 nt, Artificial Sequence
  synthesized
caccaugaaugguguuuguu

SEQ ID NO: 2750 - RNA, 20 nt, Artificial Sequence
  synthesized
cauauauucagucaacaaac

SEQ ID NO: 2751 - RNA, 20 nt, Artificial Sequence
  synthesized
ccucauauauucagucaaca

SEQ ID NO: 2752 - RNA, 20 nt, Artificial Sequence
  synthesized
ccucauauauucagucaaua

SEQ ID NO: 2753 - RNA, 20 nt, Artificial Sequence
  synthesized
cucauauauucagucaacaa

SEQ ID NO: 2754 - RNA, 20 nt, Artificial Sequence
  synthesized
gaaugguguuuauugacuga

SEQ ID NO: 2755 - RNA, 20 nt, Artificial Sequence
  synthesized
gaaugguguuuguugacuga

SEQ ID NO: 2756 - RNA, 20 nt, Artificial Sequence
  synthesized
gguguuuauugacugaauau

SEQ ID NO: 2757 - RNA, 20 nt, Artificial Sequence
  synthesized
gguguuuguugacugaauau

SEQ ID NO: 2758 - RNA, 20 nt, Artificial Sequence
  synthesized
gucaacaaacaccauucaug

SEQ ID NO: 2759 - RNA, 20 nt, Artificial Sequence
  synthesized
gucaauaaacaccauucaug

SEQ ID NO: 2760 - RNA, 20 nt, Artificial Sequence
  synthesized
guugacugaauauaugaggg

SEQ ID NO: 2761 - RNA, 20 nt, Artificial Sequence
  synthesized
uaaacaccauucauggugau

SEQ ID NO: 2762 - RNA, 20 nt, Artificial Sequence
  synthesized
uauauucagucaacaaacac

SEQ ID NO: 2763 - RNA, 20 nt, Artificial Sequence
  synthesized
uauucagucaacaaacacca

SEQ ID NO: 2764 - RNA, 20 nt, Artificial Sequence
  synthesized
uauucagucaauaaacacca

SEQ ID NO: 2765 - RNA, 20 nt, Artificial Sequence
  synthesized
uauugacugaauauaugagg

SEQ ID NO: 2766 - RNA, 20 nt, Artificial Sequence
  synthesized
ucagucaacaaacaccauuc

SEQ ID NO: 2767 - RNA, 20 nt, Artificial Sequence
  synthesized
ucagucaauaaacaccauuc

SEQ ID NO: 2768 - RNA, 20 nt, Artificial Sequence
  synthesized
ugaaugguguuuauugacug

SEQ ID NO: 2769 - RNA, 20 nt, Artificial Sequence
  synthesized
ugaaugguguuuguugacug

SEQ ID NO: 2770 - RNA, 20 nt, Artificial Sequence
  synthesized
ugguguuuauugacugaaua

SEQ ID NO: 2771 - RNA, 20 nt, Artificial Sequence
  synthesized
ugguguuuguugacugaaua

SEQ ID NO: 2772 - RNA, 20 nt, Artificial Sequence
  synthesized
uguugacugaauauaugagg

SEQ ID NO: 2773 - RNA, 20 nt, Artificial Sequence
  synthesized
uucagucaacaaacaccauu

SEQ ID NO: 2774 - RNA, 20 nt, Artificial Sequence
  synthesized
uucagucaauaaacaccauu

SEQ ID NO: 2775 - RNA, 20 nt, Artificial Sequence
  synthesized
uuguugacugaauauaugag

SEQ ID NO: 2776 - RNA, 20 nt, Artificial Sequence
  synthesized
accuccuccaccucuagccc

SEQ ID NO: 2777 - RNA, 20 nt, Artificial Sequence
  synthesized
acuaccuccuccaccucuag

SEQ ID NO: 2778 - RNA, 20 nt, Artificial Sequence
  synthesized
acugccuccuccaccucuag

SEQ ID NO: 2779 - RNA, 20 nt, Artificial Sequence
  synthesized
aggacuaccuccuccaccuc

SEQ ID NO: 2780 - RNA, 20 nt, Artificial Sequence
  synthesized
aggacugccuccuccaccuc

SEQ ID NO: 2781 - RNA, 20 nt, Artificial Sequence
  synthesized
agguaguccugggaauggga

SEQ ID NO: 2782 - RNA, 20 nt, Artificial Sequence
  synthesized
auucccaggacuaccuccuc

SEQ ID NO: 2783 - RNA, 20 nt, Artificial Sequence
  synthesized
caggacuaccuccuccaccu

SEQ ID NO: 2784 - RNA, 20 nt, Artificial Sequence
  synthesized
cauucccaggacuaccuccu

SEQ ID NO: 2785 - RNA, 20 nt, Artificial Sequence
  synthesized
ccauucccaggacuaccucc

SEQ ID NO: 2786 - RNA, 20 nt, Artificial Sequence
  synthesized
cccaggacuaccuccuccac

SEQ ID NO: 2787 - RNA, 20 nt, Artificial Sequence
  synthesized
cuaccuccuccaccucuagc

SEQ ID NO: 2788 - RNA, 20 nt, Artificial Sequence
  synthesized
cuagagguggaggagguagu

SEQ ID NO: 2789 - RNA, 20 nt, Artificial Sequence
  synthesized
cugccuccuccaccucuagc

SEQ ID NO: 2790 - RNA, 20 nt, Artificial Sequence
  synthesized
gacuaccuccuccaccucua

SEQ ID NO: 2791 - RNA, 20 nt, Artificial Sequence
  synthesized
gacugccuccuccaccucua

SEQ ID NO: 2792 - RNA, 20 nt, Artificial Sequence
  synthesized
gccuccuccaccucuagccc

SEQ ID NO: 2793 - RNA, 20 nt, Artificial Sequence
  synthesized
gcuagagguggaggaggcag

SEQ ID NO: 2794 - RNA, 20 nt, Artificial Sequence
  synthesized
gcuagagguggaggagguag

SEQ ID NO: 2795 - RNA, 20 nt, Artificial Sequence
  synthesized
ggacuaccuccuccaccucu

SEQ ID NO: 2796 - RNA, 20 nt, Artificial Sequence
  synthesized
ggacugccuccuccaccucu

SEQ ID NO: 2797 - RNA, 20 nt, Artificial Sequence
  synthesized
ggagguaguccugggaaugg

SEQ ID NO: 2798 - RNA, 20 nt, Artificial Sequence
  synthesized
ggcuagagguggaggaggca

SEQ ID NO: 2799 - RNA, 20 nt, Artificial Sequence
  synthesized
ggcuagagguggaggaggua

SEQ ID NO: 2800 - RNA, 20 nt, Artificial Sequence
  synthesized
gggcuagagguggaggaggc

SEQ ID NO: 2801 - RNA, 20 nt, Artificial Sequence
  synthesized
gggcuagagguggaggaggu

SEQ ID NO: 2802 - RNA, 20 nt, Artificial Sequence
  synthesized
gguaguccugggaaugggaa

SEQ ID NO: 2803 - RNA, 20 nt, Artificial Sequence
  synthesized
gguggaggagguaguccugg

SEQ ID NO: 2804 - RNA, 20 nt, Artificial Sequence
  synthesized
guaguccugggaaugggaaa

SEQ ID NO: 2805 - RNA, 20 nt, Artificial Sequence
  synthesized
guggaggagguaguccuggg

SEQ ID NO: 2806 - RNA, 20 nt, Artificial Sequence
  synthesized
uaccuccuccaccucuagcc

SEQ ID NO: 2807 - RNA, 20 nt, Artificial Sequence
  synthesized
uagagguggaggagguaguc

SEQ ID NO: 2808 - RNA, 20 nt, Artificial Sequence
  synthesized
uaguccugggaaugggaaaa

SEQ ID NO: 2809 - RNA, 20 nt, Artificial Sequence
  synthesized
ucccaggacuaccuccucca

SEQ ID NO: 2810 - RNA, 20 nt, Artificial Sequence
  synthesized
ucccauucccaggacuaccu

SEQ ID NO: 2811 - RNA, 20 nt, Artificial Sequence
  synthesized
ugccuccuccaccucuagcc

SEQ ID NO: 2812 - RNA, 20 nt, Artificial Sequence
  synthesized
uggaggagguaguccuggga

SEQ ID NO: 2813 - RNA, 20 nt, Artificial Sequence
  synthesized
uucccaggacuaccuccucc

SEQ ID NO: 2814 - RNA, 20 nt, Artificial Sequence
  synthesized
uucccauucccaggacuacc

SEQ ID NO: 2815 - RNA, 20 nt, Artificial Sequence
  synthesized
uuucccauucccaggacuac

SEQ ID NO: 2816 - RNA, 20 nt, Artificial Sequence
  synthesized
uuuucccauucccaggacua

SEQ ID NO: 2817 - RNA, 20 nt, Artificial Sequence
  synthesized
aaaacaacugcuccauauca

SEQ ID NO: 2818 - RNA, 20 nt, Artificial Sequence
  synthesized
aggcccagggagggaaaaac

SEQ ID NO: 2819 - RNA, 20 nt, Artificial Sequence
  synthesized
aggcccagggagggagaaac

SEQ ID NO: 2820 - RNA, 20 nt, Artificial Sequence
  synthesized
agggaaaaacaacugcucca

SEQ ID NO: 2821 - RNA, 20 nt, Artificial Sequence
  synthesized
agggagaaacaacugcucca

SEQ ID NO: 2822 - RNA, 20 nt, Artificial Sequence
  synthesized
agggagggaaaaacaacugc

SEQ ID NO: 2823 - RNA, 20 nt, Artificial Sequence
  synthesized
agggagggagaaacaacugc

SEQ ID NO: 2824 - RNA, 20 nt, Artificial Sequence
  synthesized
agugaggcccagggagggaa

SEQ ID NO: 2825 - RNA, 20 nt, Artificial Sequence
  synthesized
agugaggcccagggagggag

SEQ ID NO: 2826 - RNA, 20 nt, Artificial Sequence
  synthesized
aguuguuucucccucccugg

SEQ ID NO: 2827 - RNA, 20 nt, Artificial Sequence
  synthesized
aguuguuuuucccucccugg

SEQ ID NO: 2828 - RNA, 20 nt, Artificial Sequence
  synthesized
auauggagcaguuguuucuc

SEQ ID NO: 2829 - RNA, 20 nt, Artificial Sequence
  synthesized
auauggagcaguuguuuuuc

SEQ ID NO: 2830 - RNA, 20 nt, Artificial Sequence
  synthesized
auggagcaguuguuucuccc

SEQ ID NO: 2831 - RNA, 20 nt, Artificial Sequence
  synthesized
auggagcaguuguuuuuccc

SEQ ID NO: 2832 - RNA, 20 nt, Artificial Sequence
  synthesized
caguuguuucucccucccug

SEQ ID NO: 2833 - RNA, 20 nt, Artificial Sequence
  synthesized
caguuguuuuucccucccug

SEQ ID NO: 2834 - RNA, 20 nt, Artificial Sequence
  synthesized
ccagggagggaaaaacaacu

SEQ ID NO: 2835 - RNA, 20 nt, Artificial Sequence
  synthesized
ccagggagggagaaacaacu

SEQ ID NO: 2836 - RNA, 20 nt, Artificial Sequence
  synthesized
cccagggagggaaaaacaac

SEQ ID NO: 2837 - RNA, 20 nt, Artificial Sequence
  synthesized
cccagggagggagaaacaac

SEQ ID NO: 2838 - RNA, 20 nt, Artificial Sequence
  synthesized
cucccucccugggccucacu

SEQ ID NO: 2839 - RNA, 20 nt, Artificial Sequence
  synthesized
gaaaaacaacugcuccauau

SEQ ID NO: 2840 - RNA, 20 nt, Artificial Sequence
  synthesized
gaaacaacugcuccauauca

SEQ ID NO: 2841 - RNA, 20 nt, Artificial Sequence
  synthesized
gagaaacaacugcuccauau

SEQ ID NO: 2842 - RNA, 20 nt, Artificial Sequence
  synthesized
gaggcccagggagggaaaaa

SEQ ID NO: 2843 - RNA, 20 nt, Artificial Sequence
  synthesized
gaggcccagggagggagaaa

SEQ ID NO: 2844 - RNA, 20 nt, Artificial Sequence
  synthesized
gagggaaaaacaacugcucc

SEQ ID NO: 2845 - RNA, 20 nt, Artificial Sequence
  synthesized
gagggagaaacaacugcucc

SEQ ID NO: 2846 - RNA, 20 nt, Artificial Sequence
  synthesized
gauauggagcaguuguuucu

SEQ ID NO: 2847 - RNA, 20 nt, Artificial Sequence
  synthesized
gauauggagcaguuguuuuu

SEQ ID NO: 2848 - RNA, 20 nt, Artificial Sequence
  synthesized
gcccagggagggaaaaacaa

SEQ ID NO: 2849 - RNA, 20 nt, Artificial Sequence
  synthesized
gcccagggagggagaaacaa

SEQ ID NO: 2850 - RNA, 20 nt, Artificial Sequence
  synthesized
ggaaaaacaacugcuccaua

SEQ ID NO: 2851 - RNA, 20 nt, Artificial Sequence
  synthesized
ggagaaacaacugcuccaua

SEQ ID NO: 2852 - RNA, 20 nt, Artificial Sequence
  synthesized
ggagcaguuguuucucccuc

SEQ ID NO: 2853 - RNA, 20 nt, Artificial Sequence
  synthesized
ggagcaguuguuuuucccuc

SEQ ID NO: 2854 - RNA, 20 nt, Artificial Sequence
  synthesized
ggagggaaaaacaacugcuc

SEQ ID NO: 2855 - RNA, 20 nt, Artificial Sequence
  synthesized
ggagggagaaacaacugcuc

SEQ ID NO: 2856 - RNA, 20 nt, Artificial Sequence
  synthesized
ggcccagggagggaaaaaca

SEQ ID NO: 2857 - RNA, 20 nt, Artificial Sequence
  synthesized
ggcccagggagggagaaaca

SEQ ID NO: 2858 - RNA, 20 nt, Artificial Sequence
  synthesized
gggaaaaacaacugcuccau

SEQ ID NO: 2859 - RNA, 20 nt, Artificial Sequence
  synthesized
gggagaaacaacugcuccau

SEQ ID NO: 2860 - RNA, 20 nt, Artificial Sequence
  synthesized
gggagggaaaaacaacugcu

SEQ ID NO: 2861 - RNA, 20 nt, Artificial Sequence
  synthesized
gggagggagaaacaacugcu

SEQ ID NO: 2862 - RNA, 20 nt, Artificial Sequence
  synthesized
gugaggcccagggagggaaa

SEQ ID NO: 2863 - RNA, 20 nt, Artificial Sequence
  synthesized
gugaggcccagggagggaga

SEQ ID NO: 2864 - RNA, 20 nt, Artificial Sequence
  synthesized
guuguuucucccucccuggg

SEQ ID NO: 2865 - RNA, 20 nt, Artificial Sequence
  synthesized
guuguuuuucccucccuggg

SEQ ID NO: 2866 - RNA, 20 nt, Artificial Sequence
  synthesized
guuucucccucccugggccu

SEQ ID NO: 2867 - RNA, 20 nt, Artificial Sequence
  synthesized
guuuuucccucccugggccu

SEQ ID NO: 2868 - RNA, 20 nt, Artificial Sequence
  synthesized
uauggagcaguuguuucucc

SEQ ID NO: 2869 - RNA, 20 nt, Artificial Sequence
  synthesized
uauggagcaguuguuuuucc

SEQ ID NO: 2870 - RNA, 20 nt, Artificial Sequence
  synthesized
ucucccucccugggccucac

SEQ ID NO: 2871 - RNA, 20 nt, Artificial Sequence
  synthesized
ugaggcccagggagggaaaa

SEQ ID NO: 2872 - RNA, 20 nt, Artificial Sequence
  synthesized
ugaggcccagggagggagaa

SEQ ID NO: 2873 - RNA, 20 nt, Artificial Sequence
  synthesized
ugauauggagcaguuguuuc

SEQ ID NO: 2874 - RNA, 20 nt, Artificial Sequence
  synthesized
ugauauggagcaguuguuuu

SEQ ID NO: 2875 - RNA, 20 nt, Artificial Sequence
  synthesized
uggagcaguuguuucucccu

SEQ ID NO: 2876 - RNA, 20 nt, Artificial Sequence
  synthesized
uggagcaguuguuuuucccu

SEQ ID NO: 2877 - RNA, 20 nt, Artificial Sequence
  synthesized
uguuucucccucccugggcc

SEQ ID NO: 2878 - RNA, 20 nt, Artificial Sequence
  synthesized
uguuuuucccucccugggcc

SEQ ID NO: 2879 - RNA, 20 nt, Artificial Sequence
  synthesized
uucccucccugggccucacu

SEQ ID NO: 2880 - RNA, 20 nt, Artificial Sequence
  synthesized
uucucccucccugggccuca

SEQ ID NO: 2881 - RNA, 20 nt, Artificial Sequence
  synthesized
uuguuucucccucccugggc

SEQ ID NO: 2882 - RNA, 20 nt, Artificial Sequence
  synthesized
uuguuuuucccucccugggc

SEQ ID NO: 2883 - RNA, 20 nt, Artificial Sequence
  synthesized
uuucccucccugggccucac

SEQ ID NO: 2884 - RNA, 20 nt, Artificial Sequence
  synthesized
uuucucccucccugggccuc

SEQ ID NO: 2885 - RNA, 20 nt, Artificial Sequence
  synthesized
uuuucccucccugggccuca

SEQ ID NO: 2886 - RNA, 20 nt, Artificial Sequence
  synthesized
uuuuucccucccugggccuc

SEQ ID NO: 2887 - RNA, 20 nt, Artificial Sequence
  synthesized
acaucugucugcucagaaga

SEQ ID NO: 2888 - RNA, 20 nt, Artificial Sequence
  synthesized
acccaggauucccacaucug

SEQ ID NO: 2889 - RNA, 20 nt, Artificial Sequence
  synthesized
acccaggauucccagaucug

SEQ ID NO: 2890 - RNA, 20 nt, Artificial Sequence
  synthesized
agaucugucugcucagaaga

SEQ ID NO: 2891 - RNA, 20 nt, Artificial Sequence
  synthesized
agcagacagaucugggaauc

SEQ ID NO: 2892 - RNA, 20 nt, Artificial Sequence
  synthesized
agcagacagaugugggaauc

SEQ ID NO: 2893 - RNA, 20 nt, Artificial Sequence
  synthesized
aggauucccacaucugucug

SEQ ID NO: 2894 - RNA, 20 nt, Artificial Sequence
  synthesized
aggauucccagaucugucug

SEQ ID NO: 2895 - RNA, 20 nt, Artificial Sequence
  synthesized
aucugggaauccuggguggg

SEQ ID NO: 2896 - RNA, 20 nt, Artificial Sequence
  synthesized
augugggaauccuggguggg

SEQ ID NO: 2897 - RNA, 20 nt, Artificial Sequence
  synthesized
cacccaggauucccacaucu

SEQ ID NO: 2898 - RNA, 20 nt, Artificial Sequence
  synthesized
cacccaggauucccagaucu

SEQ ID NO: 2899 - RNA, 20 nt, Artificial Sequence
  synthesized
caggauucccacaucugucu

SEQ ID NO: 2900 - RNA, 20 nt, Artificial Sequence
  synthesized
caggauucccagaucugucu

SEQ ID NO: 2901 - RNA, 20 nt, Artificial Sequence
  synthesized
caucugucugcucagaagag

SEQ ID NO: 2902 - RNA, 20 nt, Artificial Sequence
  synthesized
ccacaucugucugcucagaa

SEQ ID NO: 2903 - RNA, 20 nt, Artificial Sequence
  synthesized
ccacccaggauucccacauc

SEQ ID NO: 2904 - RNA, 20 nt, Artificial Sequence
  synthesized
ccacccaggauucccagauc

SEQ ID NO: 2905 - RNA, 20 nt, Artificial Sequence
  synthesized
ccagaucugucugcucagaa

SEQ ID NO: 2906 - RNA, 20 nt, Artificial Sequence
  synthesized
ccaggauucccacaucuguc

SEQ ID NO: 2907 - RNA, 20 nt, Artificial Sequence
  synthesized
ccaggauucccagaucuguc

SEQ ID NO: 2908 - RNA, 20 nt, Artificial Sequence
  synthesized
cccacccaggauucccacau

SEQ ID NO: 2909 - RNA, 20 nt, Artificial Sequence
  synthesized
cccacccaggauucccagau

SEQ ID NO: 2910 - RNA, 20 nt, Artificial Sequence
  synthesized
cccaggauucccacaucugu

SEQ ID NO: 2911 - RNA, 20 nt, Artificial Sequence
  synthesized
cccaggauucccagaucugu

SEQ ID NO: 2912 - RNA, 20 nt, Artificial Sequence
  synthesized
cugagcagacagaucuggga

SEQ ID NO: 2913 - RNA, 20 nt, Artificial Sequence
  synthesized
cugagcagacagauguggga

SEQ ID NO: 2914 - RNA, 20 nt, Artificial Sequence
  synthesized
cugggaauccugggugggaa

SEQ ID NO: 2915 - RNA, 20 nt, Artificial Sequence
  synthesized
gacagaucugggaauccugg

SEQ ID NO: 2916 - RNA, 20 nt, Artificial Sequence
  synthesized
gacagaugugggaauccugg

SEQ ID NO: 2917 - RNA, 20 nt, Artificial Sequence
  synthesized
gagcagacagaucugggaau

SEQ ID NO: 2918 - RNA, 20 nt, Artificial Sequence
  synthesized
gagcagacagaugugggaau

SEQ ID NO: 2919 - RNA, 20 nt, Artificial Sequence
  synthesized
gaucugggaauccugggugg

SEQ ID NO: 2920 - RNA, 20 nt, Artificial Sequence
  synthesized
gaucugucugcucagaagag

SEQ ID NO: 2921 - RNA, 20 nt, Artificial Sequence
  synthesized
gaugugggaauccugggugg

SEQ ID NO: 2922 - RNA, 20 nt, Artificial Sequence
  synthesized
gauucccacaucugucugcu

SEQ ID NO: 2923 - RNA, 20 nt, Artificial Sequence
  synthesized
gauucccagaucugucugcu

SEQ ID NO: 2924 - RNA, 20 nt, Artificial Sequence
  synthesized
ggauucccacaucugucugc

SEQ ID NO: 2925 - RNA, 20 nt, Artificial Sequence
  synthesized
ggauucccagaucugucugc

SEQ ID NO: 2926 - RNA, 20 nt, Artificial Sequence
  synthesized
gugggaauccugggugggaa

SEQ ID NO: 2927 - RNA, 20 nt, Artificial Sequence
  synthesized
ucccacaucugucugcucag

SEQ ID NO: 2928 - RNA, 20 nt, Artificial Sequence
  synthesized
ucccacccaggauucccaca

SEQ ID NO: 2929 - RNA, 20 nt, Artificial Sequence
  synthesized
ucccacccaggauucccaga

SEQ ID NO: 2930 - RNA, 20 nt, Artificial Sequence
  synthesized
ucccagaucugucugcucag

SEQ ID NO: 2931 - RNA, 20 nt, Artificial Sequence
  synthesized
ucugagcagacagaucuggg

SEQ ID NO: 2932 - RNA, 20 nt, Artificial Sequence
  synthesized
ucugagcagacagauguggg

SEQ ID NO: 2933 - RNA, 20 nt, Artificial Sequence
  synthesized
ugagcagacagaucugggaa

SEQ ID NO: 2934 - RNA, 20 nt, Artificial Sequence
  synthesized
ugagcagacagaugugggaa

SEQ ID NO: 2935 - RNA, 20 nt, Artificial Sequence
  synthesized
uucccacaucugucugcuca

SEQ ID NO: 2936 - RNA, 20 nt, Artificial Sequence
  synthesized
uucccacccaggauucccac

SEQ ID NO: 2937 - RNA, 20 nt, Artificial Sequence
  synthesized
uucccacccaggauucccag

SEQ ID NO: 2938 - RNA, 20 nt, Artificial Sequence
  synthesized
uucccagaucugucugcuca

SEQ ID NO: 2939 - RNA, 20 nt, Artificial Sequence
  synthesized
uucugagcagacagaucugg

SEQ ID NO: 2940 - RNA, 20 nt, Artificial Sequence
  synthesized
uucugagcagacagaugugg

SEQ ID NO: 2941 - RNA, 20 nt, Artificial Sequence
  synthesized
acagcucucccucagugccc

SEQ ID NO: 2942 - RNA, 20 nt, Artificial Sequence
  synthesized
acugagggagagcugggcaa

SEQ ID NO: 2943 - RNA, 20 nt, Artificial Sequence
  synthesized
acugagggagagcugugcaa

SEQ ID NO: 2944 - RNA, 20 nt, Artificial Sequence
  synthesized
agagcugggcaagccagacc

SEQ ID NO: 2945 - RNA, 20 nt, Artificial Sequence
  synthesized
agagcugugcaagccagacc

SEQ ID NO: 2946 - RNA, 20 nt, Artificial Sequence
  synthesized
agcugggcaagccagacccc

SEQ ID NO: 2947 - RNA, 20 nt, Artificial Sequence
  synthesized
agcugugcaagccagacccc

SEQ ID NO: 2948 - RNA, 20 nt, Artificial Sequence
  synthesized
aggaggggucuggcuugcac

SEQ ID NO: 2949 - RNA, 20 nt, Artificial Sequence
  synthesized
aggaggggucuggcuugccc

SEQ ID NO: 2950 - RNA, 20 nt, Artificial Sequence
  synthesized
agggagagcugggcaagcca

SEQ ID NO: 2951 - RNA, 20 nt, Artificial Sequence
  synthesized
agggagagcugugcaagcca

SEQ ID NO: 2952 - RNA, 20 nt, Artificial Sequence
  synthesized
aggggucuggcuugcacagc

SEQ ID NO: 2953 - RNA, 20 nt, Artificial Sequence
  synthesized
aggggucuggcuugcccagc

SEQ ID NO: 2954 - RNA, 20 nt, Artificial Sequence
  synthesized
cacagcucucccucagugcc

SEQ ID NO: 2955 - RNA, 20 nt, Artificial Sequence
  synthesized
cacugagggagagcugggca

SEQ ID NO: 2956 - RNA, 20 nt, Artificial Sequence
  synthesized
cacugagggagagcugugca

SEQ ID NO: 2957 - RNA, 20 nt, Artificial Sequence
  synthesized
ccagcucucccucagugccc

SEQ ID NO: 2958 - RNA, 20 nt, Artificial Sequence
  synthesized
cccagcucucccucagugcc

SEQ ID NO: 2959 - RNA, 20 nt, Artificial Sequence
  synthesized
cuggcuugcacagcucuccc

SEQ ID NO: 2960 - RNA, 20 nt, Artificial Sequence
  synthesized
cuggcuugcccagcucuccc

SEQ ID NO: 2961 - RNA, 20 nt, Artificial Sequence
  synthesized
cugggcaagccagaccccuc

SEQ ID NO: 2962 - RNA, 20 nt, Artificial Sequence
  synthesized
cugugcaagccagaccccuc

SEQ ID NO: 2963 - RNA, 20 nt, Artificial Sequence
  synthesized
cuugcacagcucucccucag

SEQ ID NO: 2964 - RNA, 20 nt, Artificial Sequence
  synthesized
cuugcccagcucucccucag

SEQ ID NO: 2965 - RNA, 20 nt, Artificial Sequence
  synthesized
gagagcugggcaagccagac

SEQ ID NO: 2966 - RNA, 20 nt, Artificial Sequence
  synthesized
gagagcugugcaagccagac

SEQ ID NO: 2967 - RNA, 20 nt, Artificial Sequence
  synthesized
gagcugggcaagccagaccc

SEQ ID NO: 2968 - RNA, 20 nt, Artificial Sequence
  synthesized
gagcugugcaagccagaccc

SEQ ID NO: 2969 - RNA, 20 nt, Artificial Sequence
  synthesized
gaggaggggucuggcuugca

SEQ ID NO: 2970 - RNA, 20 nt, Artificial Sequence
  synthesized
gaggaggggucuggcuugcc

SEQ ID NO: 2971 - RNA, 20 nt, Artificial Sequence
  synthesized
gaggggucuggcuugcacag

SEQ ID NO: 2972 - RNA, 20 nt, Artificial Sequence
  synthesized
gaggggucuggcuugcccag

SEQ ID NO: 2973 - RNA, 20 nt, Artificial Sequence
  synthesized
gcacagcucucccucagugc

SEQ ID NO: 2974 - RNA, 20 nt, Artificial Sequence
  synthesized
gcacugagggagagcugggc

SEQ ID NO: 2975 - RNA, 20 nt, Artificial Sequence
  synthesized
gcacugagggagagcugugc

SEQ ID NO: 2976 - RNA, 20 nt, Artificial Sequence
  synthesized
gcccagcucucccucagugc

SEQ ID NO: 2977 - RNA, 20 nt, Artificial Sequence
  synthesized
gcugggcaagccagaccccu

SEQ ID NO: 2978 - RNA, 20 nt, Artificial Sequence
  synthesized
gcugugcaagccagaccccu

SEQ ID NO: 2979 - RNA, 20 nt, Artificial Sequence
  synthesized
gcuugcacagcucucccuca

SEQ ID NO: 2980 - RNA, 20 nt, Artificial Sequence
  synthesized
gcuugcccagcucucccuca

SEQ ID NO: 2981 - RNA, 20 nt, Artificial Sequence
  synthesized
ggagagcugggcaagccaga

SEQ ID NO: 2982 - RNA, 20 nt, Artificial Sequence
  synthesized
ggagagcugugcaagccaga

SEQ ID NO: 2983 - RNA, 20 nt, Artificial Sequence
  synthesized
ggaggggucuggcuugcaca

SEQ ID NO: 2984 - RNA, 20 nt, Artificial Sequence
  synthesized
ggaggggucuggcuugccca

SEQ ID NO: 2985 - RNA, 20 nt, Artificial Sequence
  synthesized
ggcaagccagaccccuccuc

SEQ ID NO: 2986 - RNA, 20 nt, Artificial Sequence
  synthesized
ggcacugagggagagcuggg

SEQ ID NO: 2987 - RNA, 20 nt, Artificial Sequence
  synthesized
ggcacugagggagagcugug

SEQ ID NO: 2988 - RNA, 20 nt, Artificial Sequence
  synthesized
gggagagcugggcaagccag

SEQ ID NO: 2989 - RNA, 20 nt, Artificial Sequence
  synthesized
gggagagcugugcaagccag

SEQ ID NO: 2990 - RNA, 20 nt, Artificial Sequence
  synthesized
gggcaagccagaccccuccu

SEQ ID NO: 2991 - RNA, 20 nt, Artificial Sequence
  synthesized
ggggucuggcuugcacagcu

SEQ ID NO: 2992 - RNA, 20 nt, Artificial Sequence
  synthesized
ggggucuggcuugcccagcu

SEQ ID NO: 2993 - RNA, 20 nt, Artificial Sequence
  synthesized
gggucuggcuugcacagcuc

SEQ ID NO: 2994 - RNA, 20 nt, Artificial Sequence
  synthesized
gggucuggcuugcccagcuc

SEQ ID NO: 2995 - RNA, 20 nt, Artificial Sequence
  synthesized
ggucuggcuugcacagcucu

SEQ ID NO: 2996 - RNA, 20 nt, Artificial Sequence
  synthesized
ggucuggcuugcccagcucu

SEQ ID NO: 2997 - RNA, 20 nt, Artificial Sequence
  synthesized
gucuggcuugcacagcucuc

SEQ ID NO: 2998 - RNA, 20 nt, Artificial Sequence
  synthesized
gucuggcuugcccagcucuc

SEQ ID NO: 2999 - RNA, 20 nt, Artificial Sequence
  synthesized
gugcaagccagaccccuccu

SEQ ID NO: 3000 - RNA, 20 nt, Artificial Sequence
  synthesized
ucuggcuugcacagcucucc

SEQ ID NO: 3001 - RNA, 20 nt, Artificial Sequence
  synthesized
ucuggcuugcccagcucucc

SEQ ID NO: 3002 - RNA, 20 nt, Artificial Sequence
  synthesized
ugagggagagcugggcaagc

SEQ ID NO: 3003 - RNA, 20 nt, Artificial Sequence
  synthesized
ugagggagagcugugcaagc

SEQ ID NO: 3004 - RNA, 20 nt, Artificial Sequence
  synthesized
ugcaagccagaccccuccuc

SEQ ID NO: 3005 - RNA, 20 nt, Artificial Sequence
  synthesized
uggcuugcacagcucucccu

SEQ ID NO: 3006 - RNA, 20 nt, Artificial Sequence
  synthesized
uggcuugcccagcucucccu

SEQ ID NO: 3007 - RNA, 20 nt, Artificial Sequence
  synthesized
ugggcaagccagaccccucc

SEQ ID NO: 3008 - RNA, 20 nt, Artificial Sequence
  synthesized
ugugcaagccagaccccucc

SEQ ID NO: 3009 - RNA, 20 nt, Artificial Sequence
  synthesized
uugcacagcucucccucagu

SEQ ID NO: 3010 - RNA, 20 nt, Artificial Sequence
  synthesized
uugcccagcucucccucagu
